United States Patent Application Publication US 2007/0027634 A1 - sequence listing, part 2

SEQ ID NO: 3462 - DNA, 2671 bp, Rattus norvegicus
  Genbank Accession No. NM_022380
ccgccggcgctcggtggtcctgcactgggagggagcaagcgggcgcgcgagagagcgtgcggggccggaaagaccgctggctctggtggggcagaacgaggttgtaagccatggcaatgtggatacaggctcagcagctccagggcgatgcccttcatcagatgcaggccttgtacggccagcatttccccatcgaggtgcgacattatttatcccagtggatcgaaagtcaagcctgggactcaatagatcttgataatccacaggagaacattaaggccacccagctcctggagggcctggtgcaggagctgcagaagaaggcagaacaccaggtgggggaagatgggtttttgctgaagatcaagctggggcactatgccacgcagctccagaacacgtatgaccgctgccccatggagctggttcgctgtatccggcacattctatacaatgaacagaggctggtccgagaagccaacaacggaagctctccggctggaagtcttgctgacgccatgtcccagaagcaccttcagatcaaccaaacgtttgaggagctgcgtctgatcacacaggacacggagagcgagctgaagaagctgcagcagacccaagagtacttcatcatccagtaccaggagagcctacggatccaagctcagtttgcccagctggcccaactgaacccccaggagcgcatgagcagggagacagccctccagcagaagcaagtgtccctggagacctggctgcagcgagaggcacagacactgcagcagtaccgcgtggagctggctgaaaagcaccagaagaccctgcagctgctgaggaagcagcagaccatcatcctggacgacgagctgatccagtggaagcggcgacagcaactggccgggaatgggggtcctcctgagggcagcctggatgtgctgcagtcctggtgtgagaagctggccgagatcatctggcagaaccggcagcagatccgcagggctgagcacctgtgccagcagctgcccatcccaggccccgtggaggagatgctggccgaggtcaacgccaccatcacagacatcatctcagccctggtcaccagcacgttcatcatcgagaagcagcctcctcaggtcctgaagacccagaccaagttcgcggccaccgtgcgcctgctggtgggcgggaagctgaacgtgcacatgaaccctccgcaggtgaaggcaaccatcatcagcgagcagcaggccaagtccctgctcaagaacgagaacacccgcaatgattatagcggcgagatcctgaacaactgctgcgtcatggagtaccaccaggccacaggcaccctcagcgcccacttcagaaacatgtccctgaaacgaatcaagaggtctgaccgccgtggtgcagagtcggtcacggaagagaagttcacaatcttgtttgactcacagttcagtgttggtggaaatgagctggtctttcaagtcaagaccttgtcgctcccggtggtggtgatcgttcacggcagccaggacaacaatgcgacggctaccgtcctctgggacaacgcctttgcagagcctggcagggtgccatttgccgtgcctgacaaggtgctgtggccgcagctgtgtgaggcgctcaacatgaagttcaaggctgaggtgcagagcaaccggggcttgaccaaggagaacctcgtgttcctggcacagaaactgttcaacagcagcagcaaccacctcgaggactacaacagcatgtccgtgtcctggtcccagttcaaccgggagaatctgccaggacggaattacactttctggcagtggtttgacggtgtgatggaggtgttaaagaaacatctcaagcctcactggaacgatggggccatcttgggtttcgtgaacaagcagcaggcccacgacctgctcatcaacaagccagatgggaccttcctgctgcgcttcagcgactcggaaatcgggggcatcaccattgcttggaagtttgactcccaggagagaatgttttggaatctgatgccttttaccacaagagacttctctatccggtccctcgctgaccgcctgggggacctgaattacctcatatacgtgtttcctgatcggccaaaggatgaagtatattctaagtactacacaccagtcccgtgtgagcccgccaccgcgaaagcagctgacggatacgtgaagccgcagatcaagcaagtggtccccgagtttgtcaatgcttctgcagatgcagggagcggcgccacctacatggaccaggctccttccccagtggtgtgccctcaggctcactataacatgtacccacagaatcccgactctgtcctcgataccgatggggatttcgatctggaagacacgatggacgtggcacggcgtgtggaagagctcttaggccggcccatggacagtcagtggatccctcacgcgcagtcatgaccagacctcaccgcctgcagcttcactgtcctcctggaggacccttcctgtggatgttttaattccatgaatcgcttctctttggaaacaatattcgtaatgtgaagtgttaatactagtcgtgactttagtgtctctgtgcatagtggcactagtgaagggagtgtgcgtgagtgtgagtgtgtgagtttgcacgttgt

SEQ ID NO: 3463 - DNA, 1160 bp, Rattus norvegicus
  Genbank Accession No. NM_022381
ttgtcagcaagacctcgctccccttacagtaactctcatctagacgtcgcaactccgccaccatgtttgaggcacgcctgatccagggctccatcctgaagaaggtgctggaggccctcaaagacctcatcaatgaggcctgctgggacatcagttcgggcggcgtgaacctacagagcatggattcgtctcacgtctccttagtgcagcttactctgcgctccgaaggcttcgacacataccgctgcgatcgcaacctggccatgggcgtgaacctcaccagcatgtccaaaattctaaaatgtgctggtaatgaagacatcattacattaagggctgaagataatgctgataccttagcactagtatttgaagcaccaaatcaagagaaagtttcagactatgagatgaagttaatggacttagacgttgagcaacttggaatcccagaacaggagtacagctgcgtagtaaagatgccatctggtgaatttgcacgtatatgccgggaccttagccatattggagatgctgtggtgatctcctgtgcaaaggacggggtgaagttttctgcgagtggggagcttggcaatgggaacattaagttgtcccagacaagcaatgttgataaagaagaggaagctgtgtccatagagatgaatgagccagttcagctaacttttgctctgaggtacctgaactttttcacaaaagccactccactgtctcctacagtaacactcagtatgtctgcagatgtaccccttgttgtagagtataaaattgctgacatgggacacttaaagtattatttggctcccaagatcgaagatgaagaaggatcttaggcgttgctagaaattgagaaactaaacctttgacgatcgcttctgagatgccagcgtgttctgaggtcttttctgtcaccaagtttgtacctgagtattcttaaatattaaaataaaatgtagatatcttctgtaaataaccttttttttcctctccataatttgcttacagaataagctccaaagtaaaaactggttttgttaacataaatgtctctgccttacaaatactggtgattttcataaatgatcttgacgctaaatgcagttttaagaaatatttttcaatttaaataaagttaactgaatttg

SEQ ID NO: 3464 - DNA, 893 bp, Rattus norvegicus
  Genbank Accession No. NM_022385
cagtggacgtggcggcgccccggctcaattaggagtcgctgccgagtcccggcctgtcactgaggatcggcgagggcgcggcggcggtccatcatgggtggctttttctcaagtatattttccagtctctttggaaccagggaaatgaggattttaattttgggattagatggtgctggaaaaacgacaattttgtacagattgcaggttggagaagttgttactaccattcccactattggatttaatgtagagacggtgacatacaaaaatctcaagttccaagtttgggacttaggcggacagacaagtatcaggccatactggagatgttattattcaaacacagatgcagtcatctatgtcgttgacagttgtgaccgagaccgaattggcatttccaagtcagagttagttgccatgttggaggaagaggagctgaggaaagccattttagtggtgtttgcaaataaacaggacatggagcaggccatgacgccctcagaaatggccaatgcgcttgggttacccgccctgaaggaccggaagtggcagatctttaaaacgtcagcaaccaaaggcaccggcctcgacgaggcaatggaatggttagttgaaacactgaaaagcagacagtgagtccattcacatcagcgcctgtgaaccaaacgctccgtcacagactcactgaaccagtcagatgtacttctcgtgactggtggaagggactgtgtgattctagcatatacagacctgacttcactatttgtaataaatataaaaagcaagtatctggtgagagggttagcttgatcgaatcacccaaatggtttatgtaatgtaaaatatttcttccttgttttcttgtgttaaggtatatattctatttgtat

SEQ ID NO: 3465 - DNA, 2427 bp, Rattus norvegicus
  Genbank Accession No. NM_022389
cgcacgcagaacctgcggtgggcgatcaggtactgagaaagctaccaaggttgcctgctctactcagcacttgagccctggtggaggtctatctttctggaaggatctgagcctctcctccttccctcagatcctgatggcttcaaagtcccagcacaacgcttccaaagccaagaatcacaacgtcaaggctgaatctcaaggacaatggggccgtgcctgggaagtggactggttctccctggtcagcgtcattttcctgctgctcttcgcaccgttcattgtgtactacttcatcatggcatgtgaccagtacagctgctcgctgactgcccccatattggacgtagctacaggccgtgcgagtctggcagacatctgggccaagacaccgcctgtgacagctaaggctgcccaactgtatgccttgtgggtcagcttccaggtgctgctttactcctggcttcctgacttctgccacagatttctgccaggttatgtgggaggcgtccaagaaggtgccataactccagcagggattgtaaataagtatgaggtgaatgggctgcaagcctggctcattacccacttcctctggtttgtgaacgcttacctcctatcctggttctcccccaccatcatctttgacaactggatcccgttgctatggtgtgccaacatcctgggctacgctgtgtccacctttgcaatgatcaaggggtacctgttccccaccagcgccgaagactgcaaattcacaggcaatttcttctacaactacatgatggggattgagttcaacccccgcatcggaaagtggtttgacttcaagctgttcttcaatgggcgcccggggattgtggcctggactcttatcaacctgtcctttgctgccaagcagcaggagctttatggccatgtgaccaactccatgattttggtcaatgtcttacaggccatctatgtgttagacttcttctggaacgaaacctggtacctgaagaccattgacatctgccatgaccactttggatggtacctgggctggggagattgcgtgtggctgccctacctctacacactgcagggcctgtacttggtgtaccaccctgtacagctctccacccccaacgccttgggcgtcctgctgctcggcctggtgggttactatatcttccgaatgaccaaccatcagaaggacctgttccgccggacagatggacactgcctcatctggggcaagaaacccaaggccatcgagtgctcctacacgtcagccgacgggctgaagcaccgcagcaagctgttggtttcaggcttctggggtgtggcccgccacttcaactatacgggagacctgatgggcagcctcgcctactgcctggcttgtggcggcggccacctcctcccctacttctacatcatctatatgactatcctgcttacccaccgctgcctccgtgatgagcaccgctgtgccaacaagtatggccgtgactgggagcgctacgtagccgctgtgccctaccgcctgctgcctgggatcttctgagggccaccctggcaagcagaaagaggcgtcattgaatgtgtggagttgggtgcatgggggccagcatccggctttcccctgcaggggcctccttggtttgctcttctggaggatggagagccaggcgccccacagtgtctggctggtggcaactagagctgagttcacactgatgcctcagcagaatgactggttctccctgttcagcatcctgagggcagaggaccttggccctttcatgtctgttggaagcccaccatctatgttgtctagatagcttaggcttaccaggtgtctcccaggattgggccatcctggtaaactggagacaatgtaggatctaaagagttttggcaatgtcaccttcactcccacctgcaatggtgggctggacccctttttctgtctgtagcgtgatcagcagagggttcaggggccattgaaggaggaaggctctttgtttaggttctttactgtttttacccgaggaatgccaagcagcagactggaatatcccactctgcacatccctggctgacttgataaagtctgtctgacatatgagatggggttcccagaactccccaagtaccccagctagcagcttatccatctcccctcttccggaaggtgcttcttgtttacccctgagacttggctcagaggtgaacagacttggctctgacaacccagaatgtatcaccagttagtggcctcagccacaccttccccaacaggagaaccagcgttggggaaggaatccattctcattagtgacactgccccccaaaactcagggttattttgtaaaactagataggctcatgttagccttgcaagcggttctttgtattaaatctgccctgttaaatgag

SEQ ID NO: 3466 - DNA, 1307 bp, Rattus norvegicus
  Genbank Accession No. NM_022390
gtgcttttgggtttggcgatcagttccgcgggagtcttgtcaggagcaggatggcggcttcgggcgaggcgcgccgagtgctggtgtacggcggcaggggtgctctgggctcgcgctgcgtacaggccttccgggcccgcaactggtgggttgccagcattgatgtggtggagaatgaagaggccagtgccagcgtgattgttaagatgacagattcattcacggagcaggctgaccaggtcactgctgaggtcgggaagctcctaggtgaccagaaggtggatgccattctctgtgtggctggaggatgggccgggggcaatgccaaatccaagtcactctttaaaaactgtgacctgatgtggaagcagagtatttggacatccaccatctctagccacttggccacaaagcacctgaaggaaggaggcctcttgaccctggccggggccaaagctgcgttggatgggactcctgggatgattggctacggcatggccaagggagccgtccatcagctctgccagagccttgcagggaagaacagtggcatgccgtctggggctgccgccattgctgtgcttcccgtcaccctggatactccgatgaacaggaaatcaatgcccgaggcagacttcagctcctggacacccttagagttcctggtggagaccttccatgactggatcactgggaacaaacggccaaactcaggaagcctaatccaggtggtaaccacagacgggaagacagagcttactccagcctatttctaagttgcacctcagtgcccaggagaaccctcttgaaactctactaacctgtgtctgtattgccgcacctggccccatgttgtctgtattcctgtttgtggtacgagataactagtcccgtttgtctcttacgtagtgctccttttttgtcctgggctggtgaggtatgtttatggggaatgagtgggggcctgtaagtagcaccatcagtgctgaggcccagggaggtatgtgtgcaggccgtcatcccagcatcccagactgctttggagacccgtttgatagttcattttttagcatttggggcactttgaaatccaacttgtttttaaattccatgttagtgccatagatgtagtttttgctgcctgaaaattaactgccatgaaaattcattggtgatgtaagtaagcaaaacctaatggactctgttggatatcatttgtgttccagcctaggctaagtgtttatgagaactattcgtgagtgttcggagtgttcttcctaataaacacatttcatgtccccgaattc

SEQ ID NO: 3467 - DNA, 2410 bp, Rattus norvegicus
  Genbank Accession No. NM_022392
tacgctgctttggtggcgtgcacctctcacggtgtgcctagccgccgatgcccaggctgcacgatcacgtctggagctacccaagcgcgggcgctgcgaggccgtacagcctcccgcgaggcatgattgcggcggccctctgtccgcagggccccggagcccccgagcccgagcccgcgccccggggccagcgagagggaaccgcaggcttcagcgcacgacccggcagctggcaccacgacctggtgcagcggagcctcgtgctcttctcatttggcgtggtcctggctctggtgctcaacctgctgcagatccagcggaatgtcacgctcttcccggacgaggtgatagccaccatcttctcctccgcctggtgggtgcccccgtgctgtggcacggcagccgctgttgtcggcttattgtatccctgtattgacagtcacctgggagaaccacacaagttcaagagagagtgggccagtgtcatgcgatgtatcgcggtgtttgttggcatcaaccatgccagtgccaaattagatttcgccaataatgtgcagctgtccctgactctggcagccctatccttgggcttgtggtggacgtttgatcgatcccgaagtggcctggggctcgggatcaccatcgccttcctagccacgctgatcactcagtttcttgtttataatggcgtctaccagtacacgtccccagatttcctctatatccgttcttggctcccttgtatatttttctcaggaggtgtcacagtgggaaacataggacgacagttagctatgggtgttccagaaaagcctcacagtgactgagtttgagcacatgattcagggcggaagcagaatgtggagacactggtcctgggtgtggtgaagaggatctttttctcaatgttccatttagactgggctgatgataaatgactcctaaagatgcgttcacgtagtctaaatagcaagtggaggcaaggactacttacctaaagtcttaccttgctcacccaccctcacacctgtctgcactggaacattctatcccaggctgtatgtgagagttgggtaagggggccggtttcccgagtattagatttcactcatcattcaaagcaaaatgccatatttcaaagccttgaatcaaaatgaattaccaactagcagttttatatcagtgcccaaaggagagaggttgatggtgcttaacagagatgaagtatgtgcagtaagaatatttatccagaattaaaatatagggttgtgtaaagaggggctaagggcagcagtaagttggaggaagatcatgctccccggaggacccagtgcagccacatctccaggtctcgctcaggctggcgctcacacgtgggtctcatcagtgtgggaactatgctgtttactgacaggaggcttgtagacaatcttactgacagcccaggacaacacaaagtcaggattctgcattgcgatgctggacttttcatctcaatttaagtgaagttttatccaagatctggagcatctaagagtgaatagctgtctgctgtttcagtcgtaatgagccgaaattgtgtctctgtcactccagagtggagaggacttttccacagccctatggagcttgcaatctgtgattgccttgtaaaaggttgagtgtgcacgtcactgcgttcggtgcgcagtgtcctgtgtgtgttggacagcgtagaacacatgggaccttgcaagtattgggtcttcaacttcaagtgcaatgtgtatgaaaccaatctgagccttgtattctcttaaatatttattatttttttttaaccgcgcgagctgttctggagaagggttctcgggtcatttcagagctgtgtgaggcacactcagcaatactgtgtcagccgtgacgctccccagtcacaccctccactacaccctagtcctttgacatactccaggtttgtaagtttagtgatttttacttacaaatttacccttttttgcattctaaaattgtgtttaaattatatggaagtacttggtgtaggcagtcattggtccccgggcagcagaagctctgcctgtggaatcgggtttgggttcactctgcagggctcctcatagaggctttgcttatttgttttgaggaaaatgtctggagtaaacctttgttttctgaaactactttagctaaaagaaaatgggtgttctagactttggaatggttcttaaagtttcctggaaataaaaataatgattggcacttcaaagacattctttagccaagacttcagtgtctagcagaaaccacaagtgactagaagagcaagtgatcttggtgatgcacttgattgtatacaatgagtattttttctcttaaactggaaataaatctgttagaaataatatagcca

SEQ ID NO: 3468 - DNA, 1570 bp, Rattus norvegicus
  Genbank Accession No. NM_022395
ccctatccacagcagagatggcggcggcggctgtatcccggacgttgttgccggtggccggacggcgcctgtggggatttacgcgaaggcttccgctccgcgccgccgctgctcagccattgtactttggaggggaccgactcagaagtacacaggctgctccacaagttgttctgaatgttcctgagacacaagtcacttgtttggaaaatggactcagggtagcttctgaaaactctgggatctcaacatgcaccgttgggctgtggatcgatgctggcagtcggtatgagaatgaaaagaacaatggcaccgctcactttctggagcacatggctttcaagggcactaaaaagaggtcccagttagaccttgaacttgagattgagaacatgggtgcccatctcaatgcctatacctccagagagcagactgtctactacgccaaagccttctccaaagatttgccaagagctgtagaaattcttgctgacataattcagaacagtacattgggagaggcagagattgaacgtgagcgtggagtcatcctcagagaaatgcaggaagttgagaccaacttgcaagaagttgtctttgattatctgcacgccacagcctatcaaaacaccgcgctcggacggacaattctgggaccaaccgagaacatcaaatctataagccgtaaggacttagtggactacataaccacacattataagggaccaagaatcgtgctggctgctgctggaggtgtttgccataacgaactgctggagttagcgaagtttcattttggtgactctttgtgcgcacacaaaggagatgtaccagctctgcctccctgtaaattcactggaagcgagattcgggtgagggatgacaagatgccactggcgcacctcgcagtggctattgaagcagttggttggacgcacccagacacgatccgtctcatggtcgcaaacacactgataggcaactgggaccgctctttcggaggaggaatgaatttatcgagcaagctggcccagctcacgtgccatggcaatctctgccacagcttccagtccttcaacacctcctacacagacacaggattgtgggggctctatatggtttgtgaacaagccacagttgctgacatgctgcacgctgtacaaaaggaatggatgcgtctgtgcacagctgttagtgagagtgaggtcgcacgcgccaaaaaccttctcaagacaaacatgctgctgcagcttgatgggtcaactccgatctgtgaagacatcggtaggcagatgctatgctacaacaggagaatccccatccctgagcttgaggccaggatcgatgctgtggacgcggagatggttcgagaagtgtgcaccaagtacatttatggcaaaagcccggccattgctgctctcggtcctattgagcgcttaccagattttaaccagatttgtagtaacatgcgctggactcgtgactgatttttgtgatgaattatcctacacatacatatttataaaactgagacctagaagttttgaaagactgctcatcttcaagtgaa

SEQ ID NO: 3469 - DNA, 946 bp, Rattus norvegicus
  Genbank Accession No. NM_022398
  misc_feature (1)..(946): n = a or c or g or t
atggcggcgacggcgagtcccggggctggccggatggacgggaaaccccgtacctcccctaagtctgtcaagttcctgtttgggggcctggctgggatgggcgctaccgtttttgtgcagcccctggacctggtgaanaaccggatgcagttgagtggtgagggcgctaagactcgagagtacaaaaccagtttccatgccctcactagcatcctgaaggcagaagggctgaggggcatttacactgggttgtcagccggcctactgcgccaggccacctacaccactacacgtcttggtatatatacagtgttgtttgagcgcctgactggggctgacggtacaccccctggctttctcctgaaagccctgattggcatgactgcaggtgcaactggtgcatttgtgggaccaccagctgaggtggccctcatcaggatgactgctgatggccggcttccagctgaccagcgccgtggctacaaaaatgtgtttaatgccctaattagaattgcaagggaagaaggagtccccacactgtggcggggctgcatccctaccatggctcgagctgttgtcgtcaatgctgcccaacttgcttcttactcccaatccaagcaattcttgctggactcaggctacttctctgacaacattctgtgccacttctgcgccatcatgatcagtggcctggtcaccactgctgcttccatgcctgtggatattgtcaaaactaggatccaaaatatgcgaatgattgatgagaagccagagtacaagaatgggctggatgtattgctgaaagtcgtccgctatgagggtttcttcagcctgtggaagggcttcacaccatactatgcccgactgggcccccacactgtcctcaccttcatcttcttggaacagatgaacaaggcctacaagcgtctcttcctcagtggctgag

SEQ ID NO: 3470 - DNA, 1882 bp, Rattus norvegicus
  Genbank Accession No. NM_022399
cgggggccagtgtgccgccgccccctcggcccgccatgctcctttcggtgccgctcctgcttggcctcctcggcctggctgccgcagaccctgccatctatttcaaagagcagttcttggacggagatgcctggaccaaccgctgggtcgaatccaaacataagtctgattttggcaaattcgtcctcagttctggcaaattctacggggaccaggagaaggataaagggttgcagacaagccaagatgcccgattttacgcgctgtccgccagattcgaacccttcagcaacaagggccagacactggtggtacagttcaccgtgaagcatgagcagaatatcgactgtgggggcggctacgtgaagctgtttccgggtggcttggaccagaaggacatgcatggagactcagaatataacatcatgtttggtccggacatctgcggtcctggcaccaagaaggttcatgtcatctttaactacaagggcaagaacgtgctgatcaacaaggatatccggtgtaaggatgatgaattcacacatctatacacgctgattgtgcggccagacaacacctacgaggtgaaaattgacaacagccaggtggagtcgggctccttggaggatgattgggactttctgccgcccaagaagattaaggatcctgacgctgccaagccagaagactgggatgaacgagccaagattgatgaccccacagattccaagcctgaggactgggacaagccagagcacatccctgaccctgatgctaagaagcctgaggactgggacgaagagatggatggagagtgggaaccaccagtgattcaaaatcctgaatacaagggcgaatggaagccacgtcaaattgacaacccagattacaagggtacctggatacacccagagattgacaatcctgaatactcccccgatgcgaatatctatgcctatgatagttttgctgtactgggcttagacctctggcaggtcaagtctggcacaatttttgacaacttcctcatcaccaatgatgaggcctatgcagaggagtttggcaatgagacctggggtgtcaccaaggctgcagagaagcagatgaaggacaagcaggatgaggagcagaggcttaaggaagaagaagaagacaagaagcgtaaagaggaagaggaggccgaggataaagaggatgaggatgacagagatgaagatgaagatgaagaggatgagaaggaagaagatgaggaggatgccactggccaagccaaggatgagctgtagaggccacaccacctgcctccagggctggactgaggcctgaacacccgccacagagctggctgctccaataatgtctctatgagactcaagaacttttcattttttttccaggcaggttcaggtctggggtggattctgatttttgttccccctgcctcccccaatccctcccccaaccccccctttttttttactggtgtttgtctttaattcttcagccctcaacctcctggcctctcatttttgaatcaacattttttctttctgtccctttctccatctcttggtcactatcctccaactctaggaacaggtatggaggaaaagccctaggcttgagatttcatctgctctcctttctgaatctcagaggagggtaggagaagggggtggtatcttccctccccccagcactgaggaagaatggggctcttcccctttctcccttgcccccaggactgggccatttgtggggcagccagttctagcacagctcacactgagagtgtaagaactacaaacaaaatttctattaaattaagttttgtgtcttcaaaaaaaaaaaaaaaaaaaaaaaaaaaaaaaaaaaaaaaaaa

SEQ ID NO: 3471 - DNA, 1046 bp, Rattus norvegicus
  Genbank Accession No. NM_022402
acgagggcaatccctgacgcaccgccgtgatgcccagggaagacagggcgacctggaagtccaactacttccttaagatcatccaacttttggatgactacccaaaatgcttcattgtgggagcagacaatgtgggctccaagcagatgcagcagatccgcatgtccctccgcgggaaggctgtggtgctgatgggcaagaacaccatgatgcgcaaggccatccggggccacctggagaacaaccccgctctggagaagctgctgcctcacatccgggggaacgtgggctttgtgttcaccaaggaggacctcaccgagattagggacatgctgctggccaataaggtgccagctgctgcccgagccggtgccatcgccccgtgtgaggtcacagtacctgctcagaacaccggtctggggcccgagaagacctctttcttccaagctttgggcatcaccactaaaatctccagaggtaccattgaaatcctgagcgatgtgcagctgataaagactggagacaaggtgggagccagcgaagccacactgctgaacatgttgaacatctcccccttctccttcgggctgatcatccagcaggtgtttgacaatggcagcatctacagcccagaggtgctggacatcacagagcaggccctgcacactcgcttcctagagggtgtccgcaatgtggccagcgtctgtctgcagattggctacccgactgttgcctcagtgcctcactccatcatcaatggatacaaaagggtcctggctttgtctgtggagactgactacaccttcccactggctgaaaaggtcaaggccttcctggccgatccatctgcatttgcggctgcggcccctgtggctgctgccaccactgctgctcctgcagctgctgctgccccagccaaggtcgaagcaaaggaagagtcggaggaatccgatgaggacatgggattcggtctcttcgactaagcccctcacaccaagtcagcctgcttaatttgagaaagatggaaataaaggcttacttctctt

SEQ ID NO: 3472 - DNA, 2012 bp, Rattus norvegicus
  Genbank Accession No. NM_022407
acctgtgttccaggagccaaaccagcaatgtcttcccctgcacagcctgcagttcctgccccactggccaacttgaagattcaacacaccaagatcttcataaacaatgaatggcatgattcagtgagtggcaagaaatttcctgtccttaaccctgcaactgaggaggtcatctgccatgtggaagaaggggacaaggcagatgttgacaaagctgtgaaggccgcaagacaggctttccagattggctccccatggcgcaccatggatgcttcagagagaggacgcttgctgaacaagctggctgacttaatggagagagatcgtctgctgctggctacaatagaggccatcaatggtgggaaagtctttgccaatgcgtacttgtcggatttaggaggcagcataaaagcattaaagtactgtgcaggctgggctgacaagatccatggtcaaacaataccgagtgatggagacattttcacttttacgagacgtgaacctattggggtgtgtggccaaatcatcccttggaattttccactgcttatgttcatttggaagataggccctgccctcagctgtgggaacacagtggtcgtcaagccagcagagcaaactcctctcactgctcttcacatggcatctttaataaaagaggcagggtttcctcctggcgtggtgaacattgtccctggttatgggccaactgcgggggcagcgatctcctctcacatggatgtggacaaggtggccttcacgggatcaacccaggttggcaaattaatcaaggaagctgcaggaaaaagcaatctgaagagggtcacgctggagcttgggggaaagagcccttgcattgtgtttgcagatgccgacttggacattgctgtcgagtttgcacaccatggagtcttctaccatcaaggccaatgctgcgtcgcggcatcccggattttcgttgaggagtcagtttatgatgagtttgtgagaaagagtgttgagcgagccaagaaatatgtccttggaaatcctctgacccaaggaataaatcagggccctcagattgacaaggagcaacatgataaaatccttgatctcattgagagtgggaagaaagaaggagccaaactggagtgtggtggaggacgctgggggaacaaaggcttctttgtccagcccacagtcttctccaatgtgaccgatgagatgcgcattgccaaagaggagatatttggaccagtgcaacaaatcatgaagtttaagtccatagatgatgtgatcaagagagcaaacaatactacctatggtctagcagcaggagtcttcacaaaagacctggacagggccatcactgtgtcttctgctctgcaggccggggtagtgtgggttaactgctatatgatcttgtcagcccagtgccccttcggtggattcaagatgtctggaaatggacgagaactgggtgaacatggtctttatgagtacactgagctcaagacagttgcaatgaaaatatctcagaagaactcctaagaagcagagtgaagagaaactctcagctgtggctacacgtctcctatcgtcaccagcaaagtgttgttttactataattttttcttctgttgatttctttacatgatgaatccatcagtgttactgttactcatagaaaacatgtagcttaatcctacaaaaccactcaccttctaatatgtgactccagtccttatcccagaataaaaggatagatttaggtgcaagctctctgtaactctgtcatgataggtgctttctgtcgtagctccctgtctagagtactcatttggtgaggaggaccagtcgtgatttaagctctgtccctctgtgaccccttgaactgcttctcggcatgcatgataactgcagagtcggctgctctgtttcccaggtgttgtgaaatgttttctagaaagccatgcctgcttatcaaatgaaatgcccagctgtaattagaatgcaaagctaataaaggg

SEQ ID NO: 3473 - DNA, 552 bp, Rattus norvegicus
  Genbank Accession No. NM_022500
atgacctctcagattcgtcagaattattccaccgaagtggaagctgccgtgaaccgcctggtcaacttgcacctgcgggcctcttacacctacctctctctgggcttcttttttgatcgggatgacgtggctttggaaggcgtaggccacttcttccgcgaattggccgaggagaagcgcgagggcgccgagcgtctcctcaagttgcagaacgaacgcgggggccgtgcactcttccaggatgtgcagaagccatctcaagatgagtggggtaaaaccctggaggccatggaagctgccttggccctggagaagaacctgaaccaggccctcttggatctgcacgccctgggctctgcccgcacagaccctcacctctgtgacttcttggaaagccacttcctggataaggaggtgaagctcatcaagaagatgggcaaccacctgaccaacctccgtagggtgcagggcccacaaccagcgcagactggcgtggcccaggcatctctgggcgagtatctctttgagcgcctcactctgaagcacgactag

SEQ ID NO: 3474 - DNA, 1749 bp, Rattus norvegicus
  Genbank Accession No. NM_022512
gtcaggaggtcccggaggtctgtgcccatggccatggccgctgcgttgctcgcccgggccggtggctctctcggcagagctctccgcgctcgagattggcgaagattacatactgtttaccagtctgtggaactacctgagacacatcagatgttgcgccagacatgccgggactttgctgagaaggagctggtccccatcgctgcccagctggacaaggaacatctcttccccacatcgcaggtgaagaagatgggggagctcgggctgctggccatggatgtgccagaggagctgagtggtgctggcctggattacctggcctactcgatcgccctggaggagatcagccgtggctgcgcctccaccggagtgatcatgagtgtcaacaactctctctacttgggacccatcctgaagttcggatcctcacagcagaagcagcagtggatcacccctttcaccaacggtgacaaaatcggctgttttgccctcagtgagccaggcaatggcagtgacgcgggggccgcttccaccactgcccgggaagagggtgactcctgggtcctcaacggcaccaaagcctggatcaccaactcctgggaggcttctgccacggtggtgtttgctagcaccgacaggtcccggcagaacaagggtatcagcgctttcctggttcccatgccaactcctgggcttacgctgggcaaaaaggaagacaagctgggcatccgggcctcatctacagctaacctcatctttgaggactgtcgcatccccaaggagaacctgctcggcgagcctgggatgggcttcaagatagccatgcaaaccctggacatgggccgcattggcatcgcctcccaggccctgggtattgcccaggcctccctggattgtgccgtgaagtacgccgagaaccgccatgcctttggggcacccctcacaaagctccaaaacatccagttcaagctggcagacatggccctggccctggagagtgcccgcctgctgacctggcgcgccgccatgttgaaggacaataagaagcctttcaccaaggagtcggccatggccaagctggctgcatcagaggctgctactgccattagccaccaggccatccagatcctgggcggcatggggtacgtgacagagatgccagccgagcgctactaccgagatgcccgcatcactgagatctatgaaggtaccagcgaaatccagagactggtgattgccgggcatctgctccggagctaccggagctgagcccccgcccttcttgggaacttgccagcctgctcagaccatgaagggacctgcctcggtcagcctttctgcccctcactgtagcccccagtcagactaggggaaagtctgtctcagggagagggaaggtcaaccgctgtgacctgtcagctcagaatggggcggcgtggctacctctttaccccccaccaacagtgcctctctctttgagcgacctgctggaggcagggccacagagacctgaatgaccctggccctcccaatgcggatgccgttcccaagagtcctcagaggcaagaacaggaggggcagggcggggtgaggaggggaaggggatggcccagtgcttgagtccccagggttgtcgtgggaaggctggggaaccggatcatagggccctggctagaggtcaagtggccgcaggtggttctgtggctgtagagctgcctgtggtcaataaagctcacctgtgtcctg

SEQ ID NO: 3475 - DNA, 1279 bp, Rattus norvegicus
  Genbank Accession No. NM_022513
gaattcctggcccttctgctccttctctttccccatagttttaactggcaaccggtagcttcttcagcatccgtacagcctgctacaaaaatgggtactgcagaagatgtttttagaaaagatctgaagatcattcatggctaccccatggtctatgcttttgcactgggttgggaaaaaatcgaagagttccagagcagaccatgtgacattgtaatacccacttaccctaaatcaggtactacttggcttagtgaaattgtggacatggttctaaatgatggaaatgttggaaaatgtaagcgagatgttattacctctaaagttccaatgttggaacaaaatgttcctggagcaagaagatcaggtgttgaactcttgaagaaaactccatcacctcgaattataaagacacatcttccaattgatctactcccaaaatccttctgggataacaagtgcaagatgatttaccttgctagaaatggcaaggatgttgctgtgtcctattatcattttgatctaatgaataatattcagcctcttcctggcacctgggaagaatatctggagaaattcctcgctggaaatgtggcctatggctcatggttcgatcatgttaagagttggtgggaaaagagggaagggcatcccatacttttcttatactatgaagacttgaaaaagaacccgaagaaagaaatcaagaagattgccaactttctagacaagaccttggatgaacataccttggaaaggatcgtccatcacacctcctttgaagtgatgaaggataaccccctggtcaattacacccatctgcccacagaaataatggatcacagcaagtccccattcatgagaaaaggtgttgttggtgactggaaaaattacttcacaatgacccaaagtgagaaatttgatgccatatataagaagaaattgtctggaacaacacttgagttctgcacagatattcagagtgcctaaacttcaacttgaatatatgatttcttgaaatagtagtttgacagggaaatcagatggatttgtgagggagaaataaatgtgcttttaaaacactgattaaatatgccctgcacatccctcagcaggaattattaataattccgaattatctagggccaaggtcttttgtgatcttagttttcaaagggtatgtcttcagattccaaggtgactactgaattaaataaataagttttgtgagttttgaaaaaaaaaaaaaaaaaaaaaaaaaaaaaaaaaaaaaaaaaaa

SEQ ID NO: 3476 - DNA, 2723 bp, Rattus norvegicus
  Genbank Accession No. NM_022516
cgtcccctgcggtctcctctgtgtgccatggacggcatcgtcccagacatagcagtcggtacaaagcggggatccgacgagctcttctccacgtgtgtcagcaacggccccttcatcatgagcagctcggcctcagcagccaacggaaatgatagcaagaagttcaaaggtgataacaggagcacaggagttccttccagagtcatccatgtccgaaagctacctagtgatgtcactgagggcgaggtcatctccctggggctgccctttgggaaagttaccaacctccttatgctgaaggggaagaaccaggccttcattgaaatgagcacagaggaggctgccaacactatggttaactactacacatcggtggcgccagtgcttcgtggacagcccatctacatccagttctccaaccacaaggagctcaaaaccgacagctcgcccaaccaggcacgtgcccaggcagccctgcaggctgtgaactccgtacagtcaggaaacctggccttggcagcctctgctgctgccgtggatgcaggaatggcaatggcaggccagagcccagtgctcaggatcattgtggagaaccttttctacccagtgacactggacgtgctgcaccagatcttctcgaagtttggcacagtcctgaagatcatcacgttcaccaagaacaaccagttccaggcgctgctgcagtatgctgaccctgtgagcgcccagcatgccaagctgtccctggatggccagaacatctacaatgcctgctgcacgctgcgcatcgacttctccaagctcaccagtctcaacgtcaaatacaacaacgacaagagccgagactacacacgccctgacctgccctctggagacagccagccatcactggatcagaccatggcagcagcctttggcctctctgttcctaatgtccatggagccctggcacccctggccataccctctgctgctgctgctgctgctgcagccggccgcattgccatcccagggctggcaggcgccgggaattccgtccttttggtcagcaacttgaaccctgagagagtcacaccccaaagcctctttattctcttcggcgtctacggtgatgtgcagcgggtgaagatcctgttcaacaagaaggagaacgcacttgtcgagatggcagacggcagccaggcccagctggccatgagccacctgaacgggcacaagctgcatgggaagtcagtgcgcatcaccctgtcaaagcaccagagtgtgcagctgcctcgtgagggacaggaggaccagggcctgaccaaggactatggcagctcaccgctgcaccgcttcaagaaacctggctccaagaactttcagaacatctttcctccctcagctaccctgcacctctccaacatcccgccctctgtgtcagaggatgacctcaagagcctcttctccagcaatggcggtgtggtcaaaggcttcaagttcttccagaaggaccgcaagatggcactgatccagatgggctctgtggaggaggcagtgcaggcactaattgagctgcacaaccatgacctgggcgagaaccaccacctgcgagtgtccttttccaagtccaccatctaggtgcctgtgggcctgcgaagcttccgccattccagaaaagccactttaaaaagcagctgaagtgaccttacagaccagagatttatttttttaaagagagatcagtttacctgtttttaaaaaaattaaatctagcccactttgccgtggcaggaaatggcttgggccacagaggcccaggcccagcaaccatgccttgaggggcttaggcgtgaggccacagcggtgccccaacacagccgcttctgtgccttacaaaaccagcgtgcctcacggccgcacacccaccctctaaggccaccagttgtctctagacctgcagtgagccaggcggcctatacttaggctccccaatgccgtgtaagagctggggccactcccctacacccattataatcaagtgacatgattctcccatgtccctggccagcccagagggcccaggccgtcctcagcgccgagccttgtgtgaccttgtattctattccgtggggtcacagacacctgtgcctagcaatctttccacttgaccaaatacccgagtcttttccatttatatgcaagagatagagtttttaagtaactttttatagcagtggtacaattgtatgtgtgtactctaagcttctctgtcccctgcactccttccttccagtgaccaacttgcaggtgggcccaggccagggctggagaagaagctctgaggcttgtgggtgtcctaccttcaaattttggaccaaagttttgttctctgcccgcctctgactatgcccagttgaggggctgacctctaggccttaatgtccttcctggacgcccacctccatcctagcctgtttctatgggaggggttccctgcacctcagtttctgtgaaagtcatggaagagtgtaaatatttatgattttatacctgtggggctgaggcggtgcagcattttttatggtgacagatgtatattttggtaacgactacaggctcagtattgtcctgggccagccctagccacatctaccccagcccagatggtgtattggggggagggggactttccattaaagcagtttataacctttgaaaaaaaaaaaaaaaaaaaaaaaaaa

SEQ ID NO: 3477 - DNA, 1380 bp, Rattus norvegicus
  Genbank Accession No. NM_022519
gggctctttctcctcagccttggtcaccaccccagctctgggacaacaagttgaaaatggcaccctccatctcacgggggctcctgcttctggcaggcctgtgttgcctggcccccagcttcctggctgaggatgcccaggaaaccgatacctcccagcaggaccagagtccaacctaccgtaagatttcttcaaacctggcagactttgccttcagcctataccgggagctggtccatcaatccaatacatccaacatcttcttctcccctatgagcatcaccacagccttcgccatgctctccgtggggagcaagggtgacactcgcaaacagattctagagggcctggagttcaacctcacacagatacctgaggctgacatccacaaggccttccatcacctcctccaaactctcaacaggccagacagtgagctgcagctgaacacaggcaatggcctctttgtcaacaagaatctgaagctggtggagaagtttctggaagaggtcaagaacaattaccactcagaagccttctctgtcaactttgccgactcagaagaggctaagaaagtaattaatgattatgtagagaagggaacccaaggaaagatagttgatttgatgaaacagctggacgaagacacggtttttgccctggtgaattacattttctttaaaggcaagtggaagaggccattcaatcctgagcacactagggatgctgactttcacgtagacaagtccaccacagtgaaggtgcccatgatgaaccgcctgggcatgtttgacatgtactattgcagcacactgtccagctgggtgctgatgatggattacctgggcaacgccactgccatcttcctcctgcccgatgatggcaagatgcagcatctggagcaaactctcaccaaggatctcatttcccggttcctgctaaacaggcaaacaaggtcagccattctctacttccccaaactgtccatctctggaacctataacttgaacacactcctgagctcactgggcatcacccgggtcttcaacaatgatgctgatctctctggaatcacagaggatgcccccctgaagcttagccaggctgtgcataaggctgtgctgaccttagatgagaggggaacagaggctgcaggagccactgtggtggaggccgtccccatgtctctgccccctcaagtgaagttcgaccaccctttcattttcatgatagttgaatcagaaactcagagccccctctttgtgggaaaagtgatagatcccacacgttaatcactgtcctcagaagtcacatcccttctggatcgggtccccttcctaataatattaaactcaggctggcctggcctgatgcttctgc

SEQ ID NO: 3478 - DNA, 1440 bp, Rattus norvegicus
  Genbank Accession No. NM_022526
  misc_feature (1)..(1440): n = a or c or g or t
ggcaaggcgaggcggccggcacagctcaggtgggcnggnccgtgccacgcagcgctccggagccacgccccntccctgggcggcagtgcgcgttcccgagcggcgcgcgcctcccgtctttnctcccgaggccttgcgcgcgcactgctgcccacccgcggctgccatcgcccctcagaaaaccagcggcgccatgtcttcgcctccagaaggaaagctagagaccaaagctggacatccgcccgccgtgaaagtcgctgggattcggattgtgcagaaacacccacacactggagatgggaaggaaaagaaagacaaggatgaccaagaatgggaaagcaccagccctcctaaaccaacagtgtacatctctggtgttattgcccggggtgacaaagacttccccccagcagctgcacaagtggcccaccagaagccacatgcctccatggacaaacatgtttctccaagaacgcagcatatccaacagcctcgcaagtgaccaacgcccagacccctgccacctcagcagcagcagcagcagcagcacctgtgccccctccaggatgcttccccgacaaaatcaactcaaacaccttctacagagtttactaaatttagaaatctaagacaaagcaaagtgggcctcggttgtgtcagatccccatgtttaaaactagaagaggctcaaacaccaaattttgtttctaagagtcctagtcgactgtcagtaaagggtcattgaaccccctagaagtgccaattagcagaacatggcaagtcctgagtataaggaagtccttcgcactatagcagtagtttaaagtccttacgtcgtggtcctaagaggaagaggccactttggagaggtttgataaggttaggagaagaaaaaacaaaacactatggtatggtccgaacagctgtgctcccttctgcccccagtccatggctgcaaatccctgtttttcagaaaagtcaaagagctagatgtagagccttctggagtgcctgctcttggagggtcctcctggctgtcccagtggcctacagtggctccagctcagttcacggttgctctatgagcaccatgtacgccaccagcctttccaggactactacatggcctgtaccatgtcgctaaaggagggatgggctcctcggattttatgagcaatccagtatcccaacagtggccttcacatggagcagaacacagcccccaagactgtgttgtcagtctcttctttctaattactaaaatggtgggaacccagggtcgctttggagacccaaacttgctgcagcctacagccttgctcagtcatatggaaccaaatctaggaagggaccttagagacagcaacgccagttccctgtgcagaccttcccacgtgttgcctgcatccgcttatcccttttagttcagcccatgggncc

SEQ ID NO: 3479 - DNA, 540 bp, Rattus norvegicus
  Genbank Accession No. NM_022529
ggaggtgcggctgccatggcgcggaatgtgttgtaccccctctaccagctgggcggccctcagctccgtgtgtttcgaactaacttcttcattcagttggtgcggcctggtaccgcacagcctgaagatacagtgcaattccggatccccatggagatgaccagggtggaccttcgaaattaccttgagcagatttacaacgttcctgtggctgctgtgcgcacacgggtacagcatggctccaacaggaggagggaccataagaatgtgaggatcaagaaaccggactacaaagtggcctacgtgcagctggcccacgggcagaccttcactttcccagatcttttcccagaaaaggaacccacttctccagaccctctggaagaggagctaccccagcagaggcaaagcagcgacccacggtgccctggtatcccttcctggtttggcctatgacctctgacagcaggttctgggccacagaccctagtgagcacagtggttctgacaagcccaaataaaaattttttgtggagaaag

SEQ ID NO: 3480 - DNA, 1808 bp, Rattus norvegicus
  Genbank Accession No. NM_022534
caagccctcaaggcgggttccaggagtctctcacctcccacctgtgcctgccatggagctcctgaaggcgctgctactcctgtctggagtcctcggggctcttgctgaattctgtgtaataccaaagatggacggccagctggtagagaagctgggccagcgtctcttaccttggatggatcggctttcctcagagcagttgaaccccagcatctacgtcggcctgcggctttccagcatgcaggctgggaccaaggagaacctctaccttcacaacctcaaactccattaccagcagtgcctcctgcggtccacctcgagtgatgataacagtggttgccagactaagatttctgggggcagcttggccctctacctgcttgctctcagggccaactgtgagctcctggggagccgaaagggtgacaggatggtctcacagctcaagtggttcttggaggatgagaagaaggccattgggcaccatcatgaaggccacccccacaccagctattaccagtatggcctcagtatcctggccctgtgcgtccaccggaagcgggtccatgacagtgtggtgggcaagctcctgtatgctgttgaacatgactactttacctaccagggccacctctctgtggacacagaagccatggccggcttggccttcacctgtttggaacgattcaatttcaactctgacctgagaccacggatcaccacggccatcgagacagtgcgagagaagatcctgaaggcccaggcccctgagggctactttggaaatatctatagcactccgctggcactacagatgctaatgacctctcctggggtagggctgggcccagcttgcctcaaggcaaggaaatccctgctgctcagcctacaggatggagccttccagaatcctatgatgatttcccagctgctacccgtcctgaaccacaagacctacttgaatcttatctccccagactgccaggcacccagggtcatgttggtgcccgccactgaggaccctgtccacttgtcagaagtcagcgtcacgctgaaggtctccagtgtcttgccaccatatgaacgaacagtttccgtctttgctggggcctccttggaagatgtcctgaacagggcgcgagaccttggagaattcacgtatgggacccaggcctccttgtcaggtccctacctgacatccgtactagggaaagaagctggggatcgagaatactggcagcttctccgagtccctgatacccctctgctacaaggcattgctgactacaaacccaagaacggggaaaccatcgaattgcggctagttaagatgtagccctaggctccctcctgatgtcttcggaccctgctgccacctcaagtgcgcttggaacaatgtcccccagatcacctcagctaacttcccaaagaggacctaagccactgtccaccttagagcaggaaggaaaacacctcctcccttagggaggctgctagcttgagtgtggccctgcctgactccacaggtctttcatgaagattgccccataagtctgaggaacaggatgccctcaactccctctacataaaggagtctgttggccatgggtgttgtgagtaccattgctctgggactggggtcctacaagaaggacctccatggcccaagtgctgtggttctgacccacacaccctacccctgctctctctcaggatggtggtcccaaagctggtcgtgaagcagcctttggccctcaacagggtcttccaacacaattaaagccttgatttacctaaaaaaaaaaaaa

SEQ ID NO: 3481 - DNA, 840 bp, Rattus norvegicus
  Genbank Accession No. NM_022536
gctgcgcctctcggagcgcaatatgaaggtgctcttcgccgccgccctcatcgtgggctccgttgtcttccttttgctgcctggaccctccgtggccaacgataagaagaagggacctaaagtcacagtcaaggtatactttgatttccaaattggagacgaacctgtaggacgagtgacctttggactctttggaaagactgttccaaaaacagtggataattttgtagccttagctacaggagagaaaggatttggctataagaacagcaagttccatcgtgtcatcaaggacttcatgatccagggtggagacttcaccaggggagatggcacaggaggaaagagcatctatggtgagcgcttcccagatgagaacttcaagctgaagcactatgggcccggatgggtgagcatggccaatgcaggcaaagacaccaatggctcccagttcttcataactacagtcaagacctcctggctagacggcaagcacgtggttttcggcaaagttctggaaggcatggatgtggtacggaaggtggagaacaccaagacggacagccgggacaagcccctgaaggatgtgatcattgtagactgtggcaagatcgaagtggagaaaccctttgccattgccaaggagtagagagagcctcggggacctcatccctctaaacagctgtctgtgcgggtcctgtcgattccctcacaggtgaaagcagccagtcacaaggctctgtgcggctctggctccagtgcttccatccgacggggtggccacacccctcacattccacaggcctgatttttatataaaactcctaccaatgctgatat

SEQ ID NO: 3482 - DNA, 871 bp, Rattus norvegicus
  Genbank Accession No. NM_022538
agatctgtgaccatgttcgacaagccgcggctgccgtacgtggtcctcgatgtgatttgcgtgttgctggctggattgccttttataattcttacttcaaggcatacccccttccaacgaggagtgttctgtactgatgagtccatcaagtacccttacagagaagacaccatcccttatgcgttattaggtggaatagtcattccattctgtattatcgttatgattactggagaaactctgtctgtttactttaatgtcttgcattcaaattcctttgtcagcaatcactatatagccaccatttacaaagccgttggagcctttttgtttggagcctcagccagtcagtccctgactgacattgctaagtactctataggcagactgcggcctcacttcctggctgtctgtaacccagactggtcaaaaatcaactgcagcgatggctacattgagaacttcgtatgtcaagggaatgaacagaaggtcagggaaggcaggttgtccttctactcggggcactcctcattctctatgtactgcatgctgtttgtcgcactttatcttcaagccaggatgaagggagattgggcaagactcttacgacccatgctacagtttgggcttgttgctttatccatatatgtgggcctgtctcgagtttctgattacaaacaccactggagcgacgtgttaattggcctcattcaaggagctgttgtggcaatattagtggttttgtatgtaactgatttcttcaagaccacagagtctaacaaagaaagaaaagaggactcacatacgactctacacgaaaccaccaacagacagagctacgcaaggaatcacgagccctgaaggggtcgac

SEQ ID NO: 3483 - DNA, 1944 bp, Rattus norvegicus
  Genbank Accession No. NM_022539
ggtgaagaaggagcgggccctcgccgctcgttctcgctccctctttctctctctcttcttctctctctctttccctctcgggcaacatggcgggcgtggaagaggcatcgtctttcgggggccacctgaatcgcgacctggatccagacgacagggaagagggaacctccagcacggccgaggaagccgccaagaagaaaagacggaagaagaagaagggcaaaggggctgtgtcagcagggcaacaagaacttgataaagaatcgggaacctcagtggacgaagtagcaaaacagttggagagacaagcactggaggagaaagagaaagatgatgacgatgaagatggagatggtgatggtgatggtgcagctgggaagaagaagaaaaagaagaagaagaagagaggaccaagagttcaaacagaccctccctcagttccaatatgtgacctgtatcctaatggtgtatttcccaaaggacaagagtgtgaatacccacccacccaagatgggcggacagctgcttggagaaccacaagtgaagagaaaaaggcgctagaccaggctagtgaggagatttggaacgacttccgagaagctgccgaagcacaccggcaagttaggaaatacgtcatgagctggatcaagcctgggatgacaatgatagaaatatgtgagaagttggaagactgttcccgaaagctcataaaggagaatgggttaaatgcaggcctggcctttcccactgggtgttctctcaacaactgtgctgcacattacactcccaatgctggtgacacgacagtcttacagtacgacgacatctgtaagatcgactttggaacgcatataagtggtagaataattgattgtgcttttactgttacttttaatcccaaatatgacatattattaaaagctgtaaaagatgccaccaatactggaataaagtgtgcggggattgacgtccgtctctgtgatgtcggcgaggccattcaagaagttatggagtcctatgaagtggaaatagatgggaagacctaccaagtgaaacccatacgtaacttaaatggacattcaattgggccatatagaattcatgctggaaaaacagtgcccattgtgaaaggaggggaagctacaaggatggaggaaggagaggtgtatgccattgagacctttggtagcacagggaagggcgtggttcatgacgatatggaatgttcacactacatgaaaaattttgatgtgggacacgtgccaataaggcttccaagaacaaaacacttgttgaatgtcatcaatgaaaactttggtacccttgccttctgccgaaggtggctggatcgcttgggagaaagtaaatacttaatggctctgaagaacctgtgtgacttgggcattgtagatccatatccaccactctgtgacattaaaggatcatacacagcacagtttgaacataccatactctgcgcccaacctgtaaagaagttgtcagcagaggagatgactattaaaacttagtccaaagccaactcaacgtctttattttctaagctttgttggaacacattataccacaagtaatttgcaacatgtctgttttaacagtggacctgtgtaatgccgttatccatgtttaaaggagtttgatcaaagccaaactgtctacatgtaattaaccaaggaaaaggctttcaagactttactgttaactgtttctcccgtctaggaaatgctgtactgctcactagttaggaattacttaaacgttttgttttgaagacctaagagatgctttttggatatttatattgccatattcttacttggatgctttgaatgactacatacatccagttctgcacctatgccctctggtattgctttttaaccttcctggaatccattttctaaaaaataaagacattttcagatc

SEQ ID NO: 3484 - DNA, 1433 bp, Rattus norvegicus
  Genbank Accession No. NM_022540
gctatcgtggctcttgcgttctctgaagatggcggcagctgcgggaaggttgctctggtcctcggtggctcggcctgcgagcactattttccggagtatttctgcctcaacagttcttaggcctgttgcttctagaagaacctgcttgacagacatgctgtggtctgcctgtccccaagcaaagtttgcctttagcaccagttcttcattccacacccctgctgtcacccagcatgcgccccattttaaaggtactgctgttgtcaatggagagttcaaagagctgagtctcgacgactttaaggggaaatacttggtgcttttcttctaccctttggatttcacatttgtgtgtcctacagaaattgttgctttcagtgacaaagccaatgagtttcatgacgtaaactgtgaagtagttgcggtttctgtggattcccacttcagtcatcttgcctggatcaacacgccaagaaagaatggtggtttgggccacatgaacatcacgctgttgtcggacttaactaagcagatatcccgagactacggagtactgttggaaagtgctggcattgcgctcagaggtctcttcattattgaccctaatggtgtcatcaagcacctgagtgtcaatgaccttccggtgggccgaagtgtggaagaaccactccgtttggtaaaggcgttccagtttgtggagacccatggagaagtctgcccacccaactggacaccagagtcccctacgatcaagccaagtccaacagcttcaaaagagtactttgagaaggtccatcaataataggtcatcctatgtctgctggtttacctgaagcttctcatgccaaaagagagccccagctggaatcctgaagattatttatagaatggcaaaaacctcaccatgcttgtgtttataagtactgctccatgggctttgtaattttaagacaggttcaggttaaaggtggccagctccttccatagctgtccttactagggacttcttgatggctaccaattctctacaagtgcttggtccccatttcttagatcatgtcttcagagggttaagatttcttagcctgccctgaagcttggtctacagtgaagtagcacatagcaccagtacttagtgaaatgaagtagcacatagcgccagcacttagtgaaatgaagtagcatatagtgccagcacttagtgaaagcttctgatcaaggtcctgaaatttcctcttggatttttgttaattatgctgaatttcccattattttttagtgtagtcattaactcacagtgtccttgtgtgttctaaggtattgatgagttataatcatgaaggactatgtttctaaaacactatgtcattttcttttcttcaagtgctggatgtaaagaataaaaataaacattaagataaaaaaaaaaaaaa

SEQ ID NO: 3485 - DNA, 494 bp, Rattus norvegicus
  Genbank Accession No. NM_022541
aagaattcggcacgatggccgagcttggtgaagcggacgaagcggagttacaacgcctggtggccgccgaacagcagaaggcacagttcactgcgcaggtgcatcacttcatggaactatgttgggataagtgtgtggagaagccaggaagtcggctagactcccgaactgaaaactgcctctctagctgtgtggatcgattcattgacactactcttgccatcaccggtcgttttgcccagatcgtacagaaaggagggcagtaggccataccttggaatgacggaagaccaaaagacttgttactaagcagactgaatggccagtggtgaaagacttgtcaacatgtcaggttagcgtcaggcagttaccaagtctgttggtgttaagaagtaacaaagcaaatgttcaagtgaaattttatttattggaattcagtaattccaagttgtatcacaccagttaataaatgtgaagtctccgatcaaaaaaaa

SEQ ID NO: 3486 - DNA, 2183 bp, Rattus norvegicus
  Genbank Accession No. NM_022542
gttcgcaaaatcagccatcgactcgcacaaagcagcgcactccgggacagccgagaacactacccggcagcagcgcggcgacactccgtgcatcgtatgcccctgcgcccctgccgcggcagccggagcgccccgagagaacgctccaccgcggggtccaggtgcagttagcgtgcctagcccgcatcgcgcggtcgcgggagagcgggaagcggcaagcagggagcgggacggcggcgaggcgctcgcgggcccctcctgctgcccgcgcccggcgagctcatggcggccatccgcaagaagctggtggtggtgggcgacggcgcgtgcggcaagacgtgcctgctgatcgtgttcagtaaggacgagttccccgaagtgtacgtgcccaccgtgttcgagaactatgtggcggacatcgaggtggacggcaagcaggtggagctggcgctgtgggacacggcgggccaggaggactacgatcgtttacggccgctctcctacccggacaccgacgtcatccttatgtgcttctcggtagacagcccggactctctcgagaacatccccgagaagtgggtgcccgaggtaaagcacttctgccccaatgtgcccatcatcttggtggccaacaaaaaagacctgcgcagcgatgagcatgtccgcacggagctggcccgcatgaagcaggagccagtgcgcacggatgacggccgcgccatggcggtgcgcatccaagcctatgactacctcgagtgctcggccaagaccaaggagggcgtgcgcgaggttttcgagacggccacgcgcgccgcgctgcagaagcgctacggatcccagaatggctgcatcaactgctgcaaggtgctatgaaggccgcgccctgcctcacgcccttgccagcgtggctccccctccttggcccggtcgcccactaaccgggagaaagggagacccgtgcccccgaggacaccaccagactgcctgacatctgctggtggctctggctggtcacgctgaatattagcgtgggcaccgagctccccccttcccagtgtctgtgtgtgtccagctgtgtggcacaggcctgggcgccctgctgagtgccaaggggttcctgagcgtccttttctaaagagccaggcctcgaagtgtggttgtgtgtgtgtacgactccctacacccctaccccactcctgccccacccccgcctctggtttccccaggggcatgcagagtggttgagccccagcagatgtacgcttgtaaccagcaagccactactgttgctccatgtctgtaacatagaccccctggaatcacgggaggggagggctggggaggatggggatgttacataaatacagattttattttcggaggcagaatggtattgtttagtggtgagtggtgtgaccagggcccatgagcaactcttcccaggctgggtcaggagcccacccatccaagcatgaactggactcggccatctttccacaccctggggaagacatttgcaactgacttgaggttgagaggaagcagctcccagacacagtgtctcctgggccaagccccagcgaacctcctttccagccacctgcagaggatccagggtgtgctgtggggtcacttttgccataagcgaactttgtgcctgtcctacaagtgaacattgttcagtccgagagactattgttgctgaatttatttaaaggctgaagctttttttgttgttgatgaaagaattctttgcacaattgtcccattgtttgacacccagtgcacttgtcatttgcataaggcagcattttgaccacacttgtatgctgtaacctcatctacttctgatgtttttttttttaaacaaactatgatgactttaaggagattacaaaaaagattctaatttttgctttgttttcttgaaaaaaatgtcaaccatgtgactttttaaaaatttgtgtagcatacacacagttttggtaaaggaaggcaacacgtattggggtctatttaaacctccctccctctccccacaagacaagtctcttcatctatgtgaaattttctgtacattctctgtgcagagcaaagcttcttcttccttattcccctccttcccagcccagtggtacttctactaaattgtctattgtcttgttttgtttttgttttatttt

SEQ ID NO: 3487 - DNA, 3719 bp, Rattus norvegicus
  Genbank Accession No. NM_022543
gtgtggtggaattcaaaacatattaatccagtgtttttaagctcggaaacaaaggggctcagccaggctgccccaggggaagggtgataagaagttctgggaactccagagaagggaagagcgagcttcagaactcaccaggacttcacttttaggaaaaaccttgtggcagccaaggaccggcacacacagatccaggaggaactgcagacaaatggagatacaaacagtcccagggacagcaacagtcaccccatcccactggaccagaaggtaaaagacagccagaaagaggaatcagcccagactggcctccctggggccgctttgcagacaggaacccagcatacccttttgtattgctcaccctccacaaggagactgagggcaggaaggagaaacgatctcacctaggaaactgtcctcgggaccaaccttcaagtttcttttaaaagcctctgcacgccatctccatgaaccactgttggataacacaatgacgtggaaaatgggaccccacttcaccatgctcttggccatgtggctggtgtgtggatcagcatctcagtcttctgccttggatagcgatggccgcccaggaaggaaagtacctttggcttctccaatcagcagtaggtcagctcgatatctgaggcacactgggaggtctggtggagttgagaaatccactcaggaagaaccaaatcctcagtctttccaaaggaggaagagtgtaccagtgttgagattagctcacccgactgtgagaccgcccccctcaggtatcaatggagccccagtcagacctgagttgaaacccatagctaggggctccgcgagtgagatggtccgtgatgaggggtcctctgctcggacaagattgttgcgattcccctctggatccagttctcccaatatcctggccagctttgcaggaaagaacagggtgtgggtcatctcaccccctcatgcctcagagggttactcccgcctcatgatgagcctcctgaaggatgatgtgtactgtgagctggcagaaaggcacattcaacagattgtgctgttccaccaggctttttaggttggggggaaggtccggcggatcaccagtgaggggcagatcctggagcagcctctggacccaaatctcatccccaagctgatgagcttcctgaaactggagaagggcaagtttagcatggtgctgttgaaaaagtccctccaggtggaggagcgctacccctacccagtcagactggaagccatgtttgaggttattgatcaaggccccatccgcagattgagaaaatcaggcagaagggttttgtccaatagtgtaaggcctcgggcatagagggccatgtggtccaggaagggaacaatggcggtggtggaggaggaagcacaggcctgggcagtgacaagaggaaagaggacccaaggagaacacaaatccaccccactagagagcctccaagaaagcagaccaccaccaaggcagccactcctcaacctcccccgactccaagggccaccacgcttcctcctgctccagtcacaacagccactcgggccacatcccgggtggtgacagtagctgcaagacctacaactaccactgcctatccagctactcagaggccctggacatctcggctacatcccttctcagtctcccataggcctccggcaacagctgagatgaccaccgtcaggggcccctcagtctcagagcagctctaccctctacctcggaaggagcaacagagagaaaagccacaggccaccaggaggcctaacaaagccaccaactatggaagcttcacagccaccccgcctaccaccctctgggagggcagcacaagagctgtgggcacaagccgtttccgggacaaccggacagacaaacgagaacatggccatcaggacccaaatgtggtgccaggtcctcacaagcccataaaggggaagctgcccaaaaagaaggagaaaattctcagcaatgagtatgaagctaagtatgacctcagccggcccaccacctctcagggggaggaggagctgcaggtggataacattccctcccagaatgccaaggagtcaaaaaagcatgaaaagcccgagaaacccgagaaggagaagaaaaaaaaggggaagagtgcaaaaccagacaagttactcaggagcgaaaagcaaatgaagaaagctgagaaaaagagcaagcaggagaaagagaagactaagaagaaaaaggcaggtaagacagagcaggacgactatcagaagcccacagcaaaacatctcgctccgagtcccaggaagtcagtggccgacctgttggggtctttcgaaggcaaacgaagactcctcctgatcaccactcccaaggccgagaacaatatgtacgtgcagcagcgggatgagtatctggagagcttctgcaagatggccaccaggaggatctctgtggttactatctttggtcctgtcaacaacagctccatgaaaattgaccacttccagctagataatgagaaacccatgcgtgtggtggatgacgaggacttggtagaccagcatctcatcagtgagctgaggaaggagtatggaatgacctacaatgacttcttcatggtgctgacagatgtgggtctcagagtcaagcaatactacgaagtgccaatagcaatgaagtccgtgtttgatctgatcgatactttccaatcccgaatcaaagatatggaaaaagcagaagaaggagggcattacctgcaaggaggacaagaggcagtccctggagaatttcctatccaggttccgatggaggaggcggttgctggtgatctctgctcccaatgacgaagactgggcctattcacagcagctctccgccctcaacggtcaggcatgcaattttggcctgcgacatataaccattttgaagcttttgggcgttggagaggaagttggaggcattttagaactgttcccaattaatgggagctccactgttgagcgggaagatgtgccagcccacctggtcaaagacatccgcaaactattttcaagtgagcccagagtacttctccatgcttctagttggaaaagatggcaatgttaaatcttggtatccttctcctatgtggccgatggtcatcgtgtatgacttaattgattccatgcaacctcggagacaggaaatggccattcagcagtcactggggatgcgctgcccagaagatgagtatgcgggatatggttaccatagttatcaccaaggataccaggatggctacccaggatgactaccgtcatcatgaaagttaccaccatggatacccttactgaacagaaatgtgtaaccttattcccatccagtttccccttcatctgctaaagctgtgtgcagacagcttcataagggaatttctccatattctacataccctgcctttttctctcagtgttcttacaagattaaaggaatagtaaactttcccctactcatgagttattattaagacatttaaaagaactctctatcttgagagaggaaaatgtgctgctaaataatttttactgaaaaacaaaaggtagtatctcttttctcatataatagctattattagataagcaaatgtatataaactatttgtacatcttcatttcttctatcaatttgtaagtaaaaaattgtgttaaggaaaaaaaaaaaaaaa

SEQ ID NO: 3488 - DNA, 1581 bp, Rattus norvegicus
  Genbank Accession No. NM_022545
cacagctgtgcccacatcccgccccgcgcggaccgcttgtagccgcttctcgggccggaggatgcccaggaagctgctgctactgccccagctgtccgcgtgctccgctctgcgcgtccgcgggcccggcccgccgcctcgccggccatgaacgccgcccgcactggctaccgagtcttttcggccaactccacggccgcctgcacggagctggccaagcgcatcactgagcgtcttggtgctgaattggggaaatctgttgtttatcaggagaccaatggagaaaccagagttgaaatcaaagagtctgttcgtggccaagatattttcattatacaaaccatacccagagatgtgaatacggccgtgatggagctgctgatcatggcgtacgccctgaagactgcctgtgccaggaatatcatcggtgtcatcccctacttcccctacagcaaacaaagcaagatgaggaagaggggctccattgtgtgcaagctcctggcatccatgctggcaaaagctggtctaactcacattatcactatggatcttcaccaaaaggaaatacaaggctttttctgcttccccgtggacaaccttagagcctcacctttcctgctccagtatatccaggaagaaattccaaattacagaaatgcagtcattgtagctaagtctcctgatgctgcaaaaagggctcagtcctatgcagagagactacgcctgggcctggctgtgatccacggagaagctcagtgcacagagctagacatggatgacggtcgacactcaccccccatggtcaagaacgccactgtgcaccccggcctggagctacccttgatgatggccaaagagaagccaccaataacagtggtcggagacgtcgggggacgcattgcaatcatagtggatgacatcattgatgatgtggagagctttgttgctgctgcagagaccctgaaagagagaggtgcttacaagatctatgtcatggccacgcacggcatcctgtctgctgaagctccccgtctgatcgaggagtcccccattgatgaggtggtggtgacgaacactgtccctcacgagcttcagaaactacagtgtcccaagataaagactgtggacatcagcttgattctttctgaggcgattcggagaatccataatggcgaatccatggcttacctcttccggaacatcacagtggatgattagctccgagctgccttgacctgcaggggagcacacagcagtgtcagccggcagacaggctgccgagtcccttctcccccatcagcagaatgcagcctatttgggaatacgtcctgcggaagaggcaggctctgtcacagcaggcatccagttgtagactgagtccccacgctggtttgttcactagtgtctgctctggggaaggcaggtgaggcgttgagcttggtcagggagctgagtggccctggcactgatgcgtgcagttgtaccattggacatgaagggtccccggctgctttcacggagctcgtcagatgagagcggagcagcctgtccctcagaactgtgttgctgcaaataaaagtt

SEQ ID NO: 3489 - DNA, 1514 bp, Rattus norvegicus
  Genbank Accession No. NM_022546
tgaacccgcaggtttgcaccggaggctctcgcgggggcctcgctggccctgggcggggactcgcgggctgaggacgctcctgtgtccccagaatcctgcagaaggacagcgccatgtccacgttcaggcaggaggacgttgaggaccattatgagatgggagaggagcttggcagcggccagttcgccatcgtgcgcaagtgccagcagaagggcaccggcatggagtacgcggccaagttcataaagaagcggcgcctgccgtccagccggcgcggtgtgagccgtgaggagatcgagcgcgaggtgagcatcctgcgcgagatccgccaccccaacatcatcacgctgcacgatgtgttcgagaacaagacagatgtggtgctgatcttggagctggtgtccggcggcgaacttttcgactttctggctgagaaggagtcactgacagaggatgaggccacgcagttcctcaagcagatcctggacggtgtccactacctgcactccaagcgcatcgcgcactttgacctgaagccggagaacatcatgttgctggacaagcatgcagccagcccacgcattaagctcatcgactttggcatcgcgcacaggatcgaggccggtagcgagttcaagaacatctttggcacgccagagttcgtcgcccctgagattgtaaactatgaaccacttggcttggaagctgatatgtggagcatcggcgtcatcacctacatcctcctgagcggggcttccccattcctgggggagaccaagcaggaaacgctgacaaacatctcggctgtgaactatgactttgatgaagagtacttcagcagcaccagtgaactggccaaggacttcatccgaaggctgctggtcaaagatcccaagaggaggatgaccatcgcacagagcctggagcattcctggatcaaggttcgccggcgtgaggacggcgcccggaagccagagcgacgccgactgcgcgcggcgcgcctgcgcgagtacagtctcaagtcgcactcaagcatgccgcgaaacacgagctacgccagcttcgagcgcttctcgcgcgtgctggaggacgtggcggcggcggagcaggggctgcgcgagctgcagcggggccggcggcagtgccgggagcgcgtgtgcgcgctgcgcgtggctgcggaacagcgggaggcgcgctgccgcgacgggagcgccgggctaggccgcgacctgcgacgcctgcgcacggagctgggtcgcaccgaggctctgcgcacgcgcgcgcaggaggaggcacgggcagcgctcttgggcgctggtggcctgaaacgtcgcctgtgtcgccttgagaaccgctacgacgcgctagccgcacaggtggctgctgaggtgcagttcgtgcgcgatctggtacgcgcgctggagcaggagcggctgcaggccgagtgcggcgtgcgctaggctgcgacacccccagatctccggccatccccagaataaagctactttccacgc

SEQ ID NO: 3490 - DNA, 3109 bp, Rattus norvegicus
  Genbank Accession No. NM_022547
cccgtctgggagctcgcggttcctgtgctgactctcaaagggctgactgaccctcgcacctagcaggtacttctggattgcaagtccagggttctgggccggtgaccctgttttctctacttcctgtctttgaccttgggtaccttccaacccactgttgccatgaagattgcagtaatcggacagagcctgtttggccaggaggtttactgccagctgaggaaggagggccacgaggtggtgggtgtgttcacaatcccagacaaggatgggaaagcagaccccctgggcctggaggctgagaaggatggccgtgccgtgttcaagtttcctcggtggcgtgctcggggacaggctctgcccgaggtggtggccaaataccaggctctgggtgcagagctcaatgtgcttcccttctgcagccagttcatacccatggaggtcattaatgcccccaggcacggctccatcatctaccatccatccctgctacccaggcatcgaggggcttcggccatcaactggaccctcattcatggagataagaaaggaggcttcaccatcttctgggctgatgatggcctggacactggtgaccttctgctgcagaaggagtgtgaggtgcttccagatgacaccgtgagcacgctgtacaatcgtttcctcttcccagagggcatcaaagggatggttcaggctgtgcgactgatcgcagagggtacagccccccgctgcccccagtctgaggaaggagccacctatgagggcattcagaagaaggagacagccaagatcaattgggaccagccagcagaggccattcacaactggatccgtgggaatgacaaggtgccaggtgcctggacagaggcttgtgggcagaagctgacatttttcaactcgacactcaacacttcaggactgtcaacccagggagaagctttacccatcccaggagcccatcgtccaggcgtggtcaccaaagcaggactcatcctctttgggaatgagcatagaatgttgctggtgaagaacatccagctggaagatggcaagatgatgccagcctcccagttcttcaaggggtccgctagcagtgacctggagctgacagaggcggagttggccacggcggaggctgtgcggagctcttggatgcgaatcctgccgaacgtcccagaggtggaagactctacagatttcttcaagtcaggagctgcttctgtagatgttgtgaggctggtggaggaagtgaaggagctgtgtgacgggctggagttagaaaatgaagacgtttacatggccaccacctttagggagtttatccagctcctagtgaggaagctgagaggggaggacgacgagagcgagtgtgtcattaactacgtggaaagggcagtgaacaagctgactctccaaatgccctaccagctcttcataggcggcgagttcgtggacgctgagggctctaagacctacaataccatcaacccaacggatggaagtgtcatctgccaggtgtccctggctcaggtgagcgatgttgacaaggcagtggcagcagcaaaggaagccttcgagaacggactgtggggaaagataaatgctcgtgaccggggccggctcctgtacaggttggcggatgtcatggagcagcaccaggaagagctagccaccattgaggccctggatcgaggtgccgtctacacgctggccctgaagacgcacgtgggcatgtccatccagaccttccggtactttgctggctggtgtgataagatccagggtgccaccatccccatcaaccaggctagacccaaccgcaacctgaccttgaccaagaaggaacctgttggggtctgtggcattgtcatcccctggaactatcccttaatgatgctatcctggaagactgcagcctgcctggcggctgggaacaccgtggtgatcaagcctgcccaggtgaccccactcacagccttgaagtttgccgagctgacactgaaggctggcattcccaagggtgtggtcaacatcctcccaggatctggatccctggttggccagagactctcagaccaccctgatgtgaggaaaatagggttcacaggctccacggaggtggggaaacacatcatgaaaagctgtgctctgagcaacgtgaagaaagtctccctggagctgggtggaaagtcaccccttatcatatttgctgactgcgacctcaacaaggccgtgcagatgggcatgagctccgttttcttcaacaaaggggagaactgcattgcggcaggccggctctttgtggaggagtccatccacaaccagtttgtgcagaaagtggtggaggaggtggagaagatgaaaatcggcaatcccctggagagggacaccaatcatggcccgcagaaccatgaggcccacctgaggaagctagtggagtattgccaacgtggtgtgaaggaaggggccacactggtctgtggtgggaaccaagtcccaaggccaggattcttctttcagccaaccgtcttcacagacgtagaggaccacatgtacatcgctaaggaggagtcctttgggcccatcatgatcatctctcggtttgctgatggggatgtggatgctgtgctgtcccgggccaatgccacagaatttggcctggcctctggggtcttcacccgcgatatcaacaaggccctgtatgtcagtgacaaactgcaggcaggcactgtgttcatcaacacgtataacaagactgatgtggccgcaccttttggaggattcaagcaatctggatttggcaaagacctgggagaggcagccctgaatgagtacctgcggatcaagactgtgacttttgagtactgaagccaagtctgtgatatttctcctgtaccctgttgcctcccctcagggagccctggcccctgtctggtgtcttagcaccctcctgtccccaacactgttcccttcagctgctggagctatcagtgtggacccctgctggtgacaggacacctccggacaattggaagtggttccaagtggagtgagcagtcatgtcccggatgaataaaggttgtgagcagaagtcacctgcaaaaaa

SEQ ID NO: 3491 - DNA, 1999 bp, Rattus norvegicus
  Genbank Accession No. NM_022584
agccctaaccgcctaagtccccgggccatggcggcgattgtggcggcgctgcgcggatccagcgggcgcttccggccgcagacacgggttttaacacgcgggacgcggggcgcggcgggcgcggcgagcgcagcgggagggcagcagaacttcgatctcttggtgatcggtgggggatccggtggcctagcttgtgccaaggaagcggctcagctgggaaggaaggtggctgtggctgactatgtggaaccctctccccgaggcaccaaatggggccttggtggcacctgtgtcaacgtgggctgcatacccaagaagctgatgcatcaggccgcactgctggggggcatgatcagagatgctcagcactacggctgggaggtggcccagcctgtccagcacaactggaaggcaatggccgaagccgtgcaaaaccatgtgaagtccttgaactggggtcatcgtgtccaactgcaggacaggaaagtcaagtactttaacatcaaagccagctttgtcaacgagcacacagttcacggtgtcgacaaagccgggaaggtgactcagctttcagccaagcacatagtcatcgctacaggaggacggccgaagtaccccacacaggtcaaaggagccctggaacacggaatcacaagtgatgacatcttctggctgaaggagtcccctgggaaaacgttggtggttggagccagttatgtggccctggagtgtgccggcttcctcactggtattggcctggataccacggtcatgatgcgcagcgtgcccctccgaggctttgaccagcaaatggcgtctttggtcacagagcacatggagtctcatggcacccggttcctgaaaggctgtgtcccctccctcatcagaaaactcccgactaaccaactgcaggtcacttgggaggatctcgcttctggcaaggaggacgtgggcacctttgacactgtcctgtgggccatagggcgagttccagagaccagaaatttgaatctggagaaggctggcgttaataccaaccctaagaatcagaagatcattgtggatgcccaggaggccacctctgtcccccacatctatgccattggagatgttgctgaggggcggcctgagctgacacccacagctatcaaggcaggaaagcttctggctcagcggctctttgggaaatcctcaaccttaatgaattacagcaacgtccccacaactgtctttacaccactggagtatggctgtgtgggactgtctgaggaggaggctgtggctctccacggccaggagcatatagaggtttaccatgcatattacaagcccctagagttcacagtggcagatcgggatgcatcacagtgctacataaagatggtatgcatgagggagcccccacaactggtactgggcctgcacttccttggccccaacgctggagaagtcacacaaggatttgctcttgggatccagtgtggggcttcatacgcacaggtgatgcagacagtagggatccaccccacctgctctgaggaggtggttaagctgcacatctccaagcgctctggcctggatcctactgtgaccggctgctgaggttaagttaccatccctgctgagctaaggatacacactgtgcctgccatgtgcccagtacaaggctctcagacacctggacctagctattgtcatgggagccactgtgccagcatgattccaggcacatggtgaagctacctagaacaggactggaaggccttgctgcctcgcagagatctgagaagatgtggatggagcattgtgtatctgaatagatggtgtgtgtcctgcagggatgactgccccctctaacctctggccagccttcacacactgccagtgtcagatgatgacggcctgtgcagaaacccccacgtgggctgccaggtttgaacccctggcatttctggagtgctaataaagagcgtgttttagtaaaaaaaaaaaaaaaaaa

SEQ ID NO: 3492 - DNA, 4269 bp, Rattus norvegicus
  Genbank Accession No. NM_022585
tctcggccgcggtgtttccgtttctctccctggttgtcgcctgctctgctcttctcatccttctcgctctgctgctctgcggagtgacgaggctgaatcttctccccacccagttcgcgcttttcttctttttctcgcgccgctccatttctccagtccggctgccgccgccactgctgctcagctggtgtcggtgccgcgcgtttcccccacgtcgtccccgcagcctatggcccaggccgccttgggtatttctgctcaaggtaaccacatccctctttaaaaattccgccgaaaaagagaagacgctttacccgactctttgggccgttatctcacggcgaactttctgaccgagtatacaactacccagaaggcctaggagaagtgctgtatagagagcagttcgattttaacgctgagccaccttgggaacctagctgatgataggggggttccatctcctaacttgtccatggaggtcttcacttcagaaacccaagactcacattcatccagcttggtgtcaagtgggctgttgctgccaggattatcttgtgattatatgaaagatgtatcagtttcttctgaagtgcagtcaactgtagaagcctttgtagcaggtgtgtaacaagtttgttgcatattctaaggacccagacataggcttggtggcccgtctcttgtttttcctggtttatgactttcggctttgtggaatacggctgagatgaaaggatttattgacgatgcaaactactccgttggcctgttggatgaaggaacaaaccttggaaatgttattgataactatgtttatgaacataccctgacaggaaaaaatgcattttttgtgggggatcttgggaagatcgtgaagaagcacagtcagtggcagaacgtggtggctcagataaagccattttacatggtgaagtgcaactccactccagccgtactggagatcttggcagctcttggaactggatttgcttgttccaccaaaaatgaaatggctttagtgcaagaattaggcgtatctccagaaaacatcatttatacaagtccttgtaagcaagcatctcagataaagtacgcagcaaaagttggagtaaatattatgacatgtgacaatgaagttgaattaaagaaaattgcgaggaatcacccaaatgccaaggtcttactacatattgcaacagaagataatattggaggtgaagatggtaatatgaagtttggcactacactgaagaactgtaggcatcttttggaatgtgccaaggaacttgatgtccaaataattggggttaaatttcatatttcaagtgcttgcaaagaatatcaagtctatgtccatgccctgtctgatgctcgatgtgtgtttgacatggctggggagtttggctttacaatgaacatgttagacatcggtggaggcttcacaggaactgaaattcagttggaagaggttaatcatgttatcagtcctctgttggatatttacttccctgaaggatctggcattcagatcatttccgaacctggaagctactatgtatcttctgcatttacgcttgcagtcaatattattgctaagaaagttgttgaaaatgataaattatcctctggagtagaaaaaaatgggagtgacgagccagccttcgtgtactacatgaatgacggtgtttatggttcttttgcaagtaagctttctgaggacttaaatactgttccagaggttcacaagaaatacaaggaagatgagcctctgtttacaagcagcctttggggtccatcctgtgacgagcttgatcaaattgtggaaagttgtcttcttcctgagctgagcgtgggagattggcttatctttgataacatgggagcagattctttgcacggaccgtctgcttttagtgacactcagaggccagctatttatttcatgatgtcactcagtgattggtatgagatgcaagatgctggaattacttcagatgcaatgatgaaaaacttcttctttgcaccctcttgcattcagctgagccaagaagacaacttctccactgaagcttaaacaggcattaacgcttctttagatctgaagtcgcaggttaagcttgtctggtctacattccagtgtggggaaaaattcaatcaatctttattctgttaattttcttggaaacaaattcatagtaatagctgtttgggaccagacaaaatcagctttcatctataattcattgggggtaataggggatttatttagataatgtatccagatttaaacataccagtttgacccaccccttaagcgtttaaaataaaatatgcaacaaaatggatgacttagtggagatggaagcccattaattgggttccccatcaaatcgtttacatacaagtacacagtttttataataaggattcctgttaaaagtcttgtaaagttgatgtctttcacccagatctatcacatgtgagtggaagaccagtgtgacttcattagatacgtttagtgtatttagagtgtgtaaatttgtgctttggactgtagtttaataaatgtaaaattgcatcatagtatttgttgtatttgacctaatgtaaccttgtatgattgcaataaaactttgtgtagattttaccattttttcaggctaaaaatttgggaatggggctagctagcaaaggtagttttgaactagttgtgtgtatggtctgttttgagagttttctttatagtccatttgtttggtttggctcaatatactttttagttatttaattagtaatttaagtaaaaagtgtttggtaatcattgtgaagttcagattcattatggagagtcgatgtgcagtaagcatgatgtttaacaattttaacaccagaaaatgttaatcttgcataaaccaattgtaataataataggtgtttctgtatagataggatgcatagagtaccttagtaaatctttgaatcacaaatcttttggctgatagaaaagattttattaaacactgaaaacttggtcggggatggggagagagactgcagaagactgcagaaccctaaccttaaagaagggctatgtctatttccagcatcctgatgccccttcgcacagacatttaaatcgagagggctttggggtggtgaagcacactcttcaatttctcacttgtaatggtatcaaattgcaatttttttgttgttgctgatcttggtttgaacctagtcccttagtttcttgttaattcccatttgttcaagcttagtaattcttccttccgtactaaagcttggtggggggtggggggaggagttagcttcactaacctgacactgttgccaggaattttggctttgttcactgctagtgtgttagtcctaagtctcagaatcacagaagtaatgagacaacttacaggggtcacttttcctaccttactctatgttcacaagtggaattcctgacctccaagaggaaatgtgacttcactttggtgccaatggacaggaaattctacctgtgctacataggagaagtgtgggatacacttgaatagctggattttacaccttgatttcaaggtggaaagaaattgatcatgaatctctaatttcaaatcaaaccagtaggtgcttaatatttttgatttgaatattgcccacttgaatatcatgggttctattaattataagaacaactaaggaccccagtccactgtcatctagttgcccttggacttttttccaaggtatactatggggtttatgcaaaatttgaagctaccatatgcattgttgtggtccaggaatgccaaaacttaaagcgtggtacaacctgagtccttggcctgactgtacaggcgtggtctctgtggcatcagttttgccttctgcataggagaaaggttgtatgtaacacagcccggaattgctatctcacatgtgaatgataggtaaacataagaatgtctgtattgtttttgaagactgtttgccataaatctaaagtcaaacctatgtatttcaatttggtatgcttaagaataattaatgtaaaatctttttatatgatattgtaatctcagttcaaatttaattgcaaatataaaacccaaatgatttctatatatagtaaattgaactgtcaaggtaacttgtgtgtgattctgaatacacagatacaatgtttttattcctcatgctttactttgatggcttctatcatgaaatagatgtgaaattttatgaaaaaaa

SEQ ID NO: 3493 - DNA, 2741 bp, Rattus norvegicus
  Genbank Accession No. NM_022588
ccgccggcgcccccgcgcccgcccccgccccggcccgcgcccggcccgccgcccgcgcccgcgccccgcgcccgcggccccgccgccggcccggacatggccgccaacatgtacagggtcggagactatgtctactttgagaactcctccagcaacccgtacctgatccgcaggattgaagagctgaataagacagccaacgggaatgtggaggccaaagtggtgtgtttctacagaaggcgggacatttccagcagcctcatcgcgctggctgacaagcatgcaaccctgtcagtctgctatagagccggaccgggggcggacaccggcgaggaaggggaagtggaggaggaggtagaaaacccagagatggtagacctgcctgagaaacttaagcaccagctgcggcatcgggaactgttcctctctcggcagttggagtctctgcctgccacccacatcaggggcaagtgcagtgttaccctgctcaatgagaccgagtcactcaagtcctacctggagcgtgaggatttcttcttctactctctagtctacgacccacagcagaagaccctcctggctgataaaggcgaaattcgtgtagggaaccggtaccaggctgacatcactgatttgctgaaagacggtgaggaggacggccgcgatcagtcgaagctggagaccaaggtgtgggaagcccacaatccacttgtagataagcagattgaccagtttctggtggtggcccgctctgtgggtacctttgcacgggccctggattgcagcagctccgtgcggcagcctagcctgcacatgagtgccgccgcagcctcccgagacatcaccctgtttcatgccatggacacgctgcacaagaacatctacgacatctccaaggccatctctgcccttgtgcctcagggtgggccagtgctctgcagggatgagatggaggagtggtcagcatcagaagccaacctttttgaggaagctctggaaaaatatgggaaagatttcacagacattcagcaagactttctcccatggaagtcgctcaccagcatcattgagtattactacatgtggaagaccaccgacagatacgtccagcagaaacgtttgaaagcagctgaagcagagagcaagttaaagcaggtttatattcccaactataacaagccaaacccaaaccagatcagcgtcaacagtgtcaaggccagtgtagtgaatggcacagggacaccaggccagagccccggggccggtcgggcctgcgagagctgttacaccacacagtcttaccagtggtattcttggggtccccctaacatgcagtgtcgcctctgcgcatcttgttggacatattggaagaaatatggtggcttgaaaatgccaacccggttagatggagagaggccgggaccaaaccgcaataacatgagtccccatggcatcccagctcggagcagtgggagccccaagtttgccatgaagacaaggcaggccttctacctgcatactaccaagttgacacgcattgcccggcgcttgtgccgtgagatcctacgcccatggcatgccgcacgccacccctacatgcccatcaacagtgcagcaatcaaggctgaatgcacagcacggctgcccgaagcttcccagagcccactggtgctgaagcaggtagtacggaagcccctggaggctgtgctccggtatcttgagactcatccccgcccgcctaagcccgaccctgtgaagagctcatccagtgtgctcagcagtctgacccctgccaagtcagcccctgtcatcaacaatggctcccctaccatcttgggcaagaggagctatgagcagcacaatggggtagatggtctggcaaaccatggacagaccaggcacatgggaccaagtcggaatctcctgctcaatgggaagtcctaccccaccaaagtgcgcctaatccgaggcggctccctgcctccagtcaagcggcggcggatgaactggattgacgccccagatgatgtattttacatggccaccgaggagaccaggaaaatccgaaagctgctctcatcttcagaaaccaagcgtgctgcccgccggccctacaagcctattgccctgcgccagagccaggccctgccgctgcggccacccccacctgcaccagtcaatgatgagcccattgttattgaggactaggcggtcacccacagtggcctgcctgggcccctccatcagccccagagtatccagtgaggcctgcagaggccaagcggcctccctcccccaccagactgctgcccaccccaccctctgtttccgtagtgccccaactcccgccctcacatgcagagaaactgctcctctggtggacatgcgggggaagaagtgtggtctaacttattccaagacaccgaggagtcttttttagctttgtgtttactttctggctggagcagagatgaggagtgccctgggccgtgggctgcagggcttctcagctggggtgggctctaaggttttgttgtgttctgttgaaggtgccattttaaattttatttttattacttttttgtagatgaacttgagctctgtaacttacacctggaatgttaggattggtgcagccagcagcggccaagctgcctggcagggttggtcccttgtcttttcaagtaattttcatattaaacaaaaacaaagaaaaaaatctcataaaaaggaaaacccca

SEQ ID NO: 3494 - DNA, 2098 bp, Rattus norvegicus
  Genbank Accession No. NM_022592
gaattcgggaatgtcatggatccagtgagacagatccagtgcgaccgtgaaggcaaacgctttccgttcctctcagctccaccagcttccacgtcctcgcccgaccgcgccatggagggttaccataagccagatcagcagaagctccaggccctgaaggacacagccaatcgcctgcgcatcagctccatccaggccaccaccgcggcaggctcgggacaccccacatcatgctgcagcgctgccgagatcatggctgtcctgtttttccataccatgcgctacaaggccctggatccccgaaaccctcacaatgatcgctttgtgctctccaagggccatgcagctcccatcttatatgcagtctgggctgaagctggcttcctgcctgaggcagagctgctgaacctgaggaaaatcagctctgacttggatgggcatcctgtcccgaaacaagccttcaccgatgtggccactggctccctgggccaggggctgggagctgcgtgcgggatggcatacacaggcaaatacttcgacaaagccagctaccgagtctattgcatgctgggagacggggaggtgtccgagggctccgtttgggaggccatggccttcgctggaatttacaagctggacaacctcgttgccatttttgacatcaaccgtctgggccagagcgacccagccccgctgcagcaccaagtggacgtctaccagaagcgctgtgaggcctttggctggcacgccatcatcgtggatgggcacagtgtggaggagctgtgcaaggcctttggtcaggccaagcaccaaccaacagccatcattgccaagaccttcaagggccgcgggatcacagggattgaagacaaggaggcgtggcatgggaagcccctccccaaaaacatggctgagcagattatccaggagatttacagccaggttcagagcaaaaagaagatcctcgccacgccccctcaggaggatgccccttccgtggacattgccaacatccgaatgcctaccccacccaactacaaagtgggggacaagatagccacacggaaagcctatggattggcccttgccaagctgggccacgccagtgaccgcatcatcgccctggatggagacaccaaaaattccaccttctcagagctcttcaaaaaggagcacccagaccgtttcatcgagtgctacattgctgagcagaacatggtgagcattgctgtgggctgtgccacacgtgacaggacagtgcccttctgcagcacttttgcggccttcttcacacgcgccttcgaccagatccgcatggccgccatctccgagagcaacatcaacctttgtggctcccactgcggcgtgtccattggggaagacgggccctcgcagatggccctggaagacctggccatgtttcggtcggtccctatgtccaccgtcttttacccaagtgatggagttgccacagagaaggcagtggaattagcagccaatacaaagggcatctgcttcattcggaccagccgcccagaaaatgccattatctatagcaacaacgaggatttccaggttggccaagccaaggtggtcctgaagagcaaggacgaccaagtgacagtgatcggggctggcgtaactctgcacgaggctctggctgctgcagagatgttgaagaaagagaagatcggtgtccgtgtactggaccccttcaccatcaagcccctggacaaaaagctcattctcgactgtgccagagcaaccaaaggcaggatcctcaccgtggaggaccactactatgaaggtggcataggcgaggcagtatctgctgtggtagtgggcgaacctggagtcacagtcactcgcctggcggtcagccaagtaccacgaagtgggaagccagctgagctgctgaagatgtttggtattgacaaagacgccattgtgcaagctgtgaagggccttgtcaccaagggctaggaaggacatgggatgccgggtgggtgaactacacattccagggatgttctggcaaaggtgctcaagggtgtaccgagtggaaaggtaaatatatgttttgagaaaaaccgaattc

SEQ ID NO: 3495 - DNA, 1097 bp, Rattus norvegicus
  Genbank Accession No. NM_022594
agctccagagatggctaccgcgatgacagtttccagcaaactcctcggcctgctgatgcagcagctgagaggtacccgccagctgtacttcaacgtcagccttcgatctctgagctcctctgcacaagaggcgtccaaaagaatccctgaggaagtctcagaccacaactacgagtctattcaagtaacatctgcccagaagcatgttctgcatgtacaactaaaccggccggagaagaggaatgccatgaacagggctttctggagggagttggtggaatgcttccaaaagatatctaaagactccgactgtcgggctgttgtggtctctggtgcaggaaagatgttcacttcaggtattgacctcatggacatggcatcagacatcctgcagcccccaggagacgatgtggcccgcatagcctggtacctccgagacctcatcagccgataccaaaagactttcactgtcattgagaagtgccccaagccggtgatcaccgcaattcacggaggctgcattggtggaggcgtggatcttatttctgcctgtgacattcgctactgcactcaggatgctttcttccaagtcaaggaggtggatgtgggcctggctgctgatgtaggaacgctgcagcgactgcccaaggtcattgggaaccggagcctggtcaacgagctgaccttcaccgcccgcaagatgatggctgacgaggccctggacagtgggctggtcagccgcgtgttcccagataaggacgtcatgctgaatgcagcctttgccctggcggccgatatttccagcaagagtcctgtggctgtgcaggggtcaaaaatcaatttaatctactcccgagaccattctgtggacgagagccttgactatatggccacttggaacatgagcatgctgcagacccaggacatcatcaagtcagtccaggcagccatggagaagaaggactcaaaaagcatcaccttctccaagctctgagtgccttcctgaccctggtcccctcagtgcctcctcccggtgtataactttatgacttagttcttcagttcccggggccttatctccactgtgaacaataaag

SEQ ID NO: 3496 - DNA, 1220 bp, Rattus norvegicus
  Genbank Accession No. NM_022595
gccgccgctgcagccgccggagccgagatgcctaaaggaggtagaaagggaggccataaaggccgagtgaggcagtatacaagccctgaggagatcgatgcccagctacaggctgagaagcagaaggccaacgaagaagatgaacaagaagaaggtggagatggggcttcgggtgaccccaaaaaggagaagaaatctctagactcagatgagagtgaagatgaagatgatgactaccagcaaaagcgaaaaggtgtggaagggctcattgacattgagaaccccaaccgggtggcacagacgactaagaaggtgacacaactggatctggatgggccaaaggaactttcaaggagagaacgagaagaaatagagaagcagaaagcaaaagagcgctacatgaaaatgcatttggctgggaagacggagcaggccaaggctgatctcgcccggctggcaatcatccggaaacagcgggaggaagcagcaagaaagaaagaagaagagaggaaagcaaaagatgacgcaactttgtcaggaaaacgaatgcagtcgctctccctgaataagtaagctggcctgtgggaggagatgccgggggaactgggccgtgccgccaggacctctgccatgtctcacccactctgtgccctggcgccgctgcagcagcccctacggccaggagcccctacggcctggggcctcctcttcatcttggcacagaaattgttcaggggatgtggggggggctggggggaggggcagctgctatctttgagacagaaagatgcaggacagcatttcatacgtaaccatttgaatgtttttgctgtttttagaattcgggccctggtggggtgggtggggtgcctgggaagtggcgtaaggagattccatttgtccagtagattgcacgttagtgtggggaggggggtgtggtgccagcaggcagctgctgtgggagttgatgacaaccagcccagatcatctgggtgctcactcagaggggctctcccggagcctgtgcctcgaaaggtccgtccgatgaagcctctcctctccactctgcccccttcccacctacttggtcagggctagtgcccatttttaaccctacccattgatcatttcaagaaacctctggttactgtgcatcacccagacaagacgtgctctcaaattcaacttgtatatttggcagattaaacaacattataata

SEQ ID NO: 3497 - DNA, 1904 bp, Rattus norvegicus
  Genbank Accession No. NM_022597
gagcgactgcgggcccaggttgtcgcgctgcgctcggtgagtacaggatccagcttccaggatgtggtggtccttgatccctctctcttgtctgctggcactgaccagtgcccatgacaagccttcctcacacccactgtcggacgacatgattaactatatcaacaaacagaatacaacatggcaggctggacgcaacttctacaatgttgacataagctatctgaagaagctgtgtggaactgtcctgggtggacccaacctgccggaaagggttgggttcagcgaggacataaatctacctgaatcctttgatgcacgggaacagtggtccaattgcccgaccatcgcacagatcagagaccaggggtcctgtggctcttgttgggcatttggggcagtggaagccatgtctgaccgaatctgcattcacaccaatggccgagtcaatgtggaggtgtctgctgaggacctgcttacctgctgtggtatccagtgtggggatggctgtaatggtggctatccctctggagcatggaacttctggactagaaaaggcctggtttctggtggagtatacaattctcatataggctgcttaccctacaccatccctccctgtgaacaccatgtcaatggctcccgtcccccatgcactggagagggagatactcccaagtgcaacaagatgtgtgaggctggctactccacatcctacaaggaagataagcactatgggtacacttcctacagtgtgtctgacagcgagaaggagatcatggcggaaatctacaaaaatggcccagtggagggtgcttttactgtgttttctgacttcttgacttacaaatcaggcgtatacaagcatgaagccggtgatgtgatgggaggccatgccatccgcattctgggctggggaatagagaatggagtaccctactggctggtagcaaactcctggaacgttgactggggtgataatggtttctttaaaatcctcagaggagagaaccactgtggaattgaatcagaaatcgtggctggaatcccacgcactcagcagtactggggaagattctaatctgctgggacttgattgtatagtccttaggagactttttccaaaatttagcaatgcaggcagggagtgaggcagataggagtctttgattctttgagttcacctaacatgcatgaagctttcagcaaggtttgggtgactggaccagagctgccccccatcagagccaccctacctggctcccttctagcctatcccatgacagtgatcacagcctacatcctagcctctccctagactagtgctgtgtgtagcgcctgctgctgtggctctgtctgccatccctcccacccccacctcagcatccccagaccaagggctttggctgcaggatttccaaaggaatgaacaccaactacatgatgagaggacagatgccacccgccagctgcaccttgaagctagtcacttctaggactgtggcaggctttgatggcccaatgcagttctctggagaaaactacctttccccaaggcatctgcacccattgacaatggtaatgtgcccatctctccttggtcctgccctcaaccgatgcttttccagtcagggttttgttttttgttttgttttgtgtacctcaactgagttatgaagatttgtactggttttacagatcatctcatcgtatggaaaagaacaagcttcgtggtcagtttactgggtgaccggcagacaccacaatcaaactagtctggggaaaacctgcttttttgttgtaggtgccacgtaaccctgtcagtttgacaaggaatgaccgtgccaataaaccaattctccctctgcttggaaaaaaaaaaaaaaaaaaaaaaaaaaaaaaaa

SEQ ID NO: 3498 - DNA, 1640 bp, Rattus norvegicus
  Genbank Accession No. NM_022598
agagccgtgcgcagcggcgtgtgtggggccgtgtgcagacccgcgtgtggcgcaggcaaggaccctgaaaataaacagccgctgctttgcgagtctccttcttgggtctacgtccgagtctcctctgctgtgggcagctcagacgccgaagctctaactgcagctatgagcagcaacgaatgcttcaagtgtggacgatctggccactgggccagggaatgccctactggtggaggtcggggtcgtggaatgagaagccgcggcagaggtggttttacctcggatagagggttccagtttgtttcctcgtctcttcctgacatctgttatcgctgtggtgagtctggtcatcttgccaaggattgtgatcttcaggaggatgcctgctataactgcggtagaggtggccacattgccaaggactgcaaggagcccaagagagagcgagagcaatgctgctacaactgtggcaagccaggccatctggctcgtgactgtgaccacgcggacgagcagaagtgctattcctgtggggaatttggacatattcaaaaagactgcaccaaggtgaagtgctataggtgtggtgaaactggtcatgtagccatcaattgcagcaagacaagtgaagtcaactgttaccgctgtggcgagtcagggcatcttgcacgggaatgcacaattgaggctactgcctaattattttcctttgtcgcccctcctttttctgattgatggttgtattattttctctgaatcctcttcactggccaaaggttggcagatagaggctgttcccaggccagtgagctttacttgcagtgtaaaaggaggaaaggggtggaaaaaaaaccgaatttctgcatttaactacaaaaaaagtttatgtttagtttggtagaggtgttatgtataatgctttgttaaagaaccccctttccgtgccactggtgaatagggattaatgaatgggaagagttcagtcagaccagtaagcccttctgggtttgagtgtgttcccatgtaggaggtaaaaccaattctggatgcatctaagcttccatgaataactttaattcttagcataatgatggccttggattgtctgacctcagtagctattaaataacatcgagtaacatctgcatcaggccctcatagaacattcagttgagttgggagtaaactgaaaagacaaatgtgttgaaggatatgccagggaatctggctaaagcctaatacaggagcatcttcatcccagtgttgatgctggacgtacagaaggtgatggcaaaggtgtagaacacattttttcaaagactaaatctaaaacccagagtaaacatccgatgctcagagttagcataatttggagctattcaggaattgcagagaaatgcattttcacagaaatcaagatgttatttttgtatactatatcacttagacaactgtgtttcatttgctgtaatcagtttttaaagtcagatggaaaaagcaactgaagtcttagaaaatagaaaatgtaattttaaactattccaataaagctggaggaggaaggggagttttgactaaagttccttttgtttgttttaaattttcatcaatgtatatagaacaaaatgccatattaaaga

SEQ ID NO: 3499 - DNA, 2133 bp, Rattus norvegicus
  Genbank Accession No. NM_022602
cgctcggccagctgccgtctacgggcttccgcgcggccaccgggcaactgcgccgcgcggctgccccactgagcgctcggcctcggggccgtgggatccgccgcgctgtctgcggtcaggaagaccgccctcccgcgtccgtgccggacgggtcagaggcggcgccgcacgcgaggccacccgcgatgctgctgtccaagttcggctccctggcgcacctctgcgggcctggcggcgtggaccacctcccagtgaagatcctacagccagccaaggcggacaaggagagcttcgagaaggtgtaccaggtgggcgccgtgctcggcagcggcggcttcggcacggtctacgcgggcagccgcatcgccgacggactcccggtggctgtgaagcacgtggtgaaggagcgggtgaccgagtggggcagtctcggcggaatggccgtgcccctggaggtggtgctgctgcgcaaggtgggcgcggcgggcggcgcgcgcggcgtcatccgcctgctggactggttcgagcggcccgacggcttcctgctggtgctggagcgacccgagccggcacaggacctcttcgacttcatcactgaacgcggcgccctggacgagcctctggctcgtcgcttcttcgcgcaggtgctcgccgctgtgcggcactgccacaattgtggggtcgtgcaccgcgacatcaaggacgagaacctgctggtggacttgcgctcgggcgagctgaagctcatcgacttcggctcgggcgcggtgctcaaggacacggtctacactgactttgatggcacccgtgtgtacagccccccagagtggatccggtatcatcgatatcacgggcggtctgccactgtgtggtctctgggtgtactgctctacgacatggtgtgtggggacattccctttgagcaggatgaggagatcttgcgcggcaggctctttttccggaggagggtctccccagagtgccagcagcttattgagtggtgtctctccctgcggccctcagagaggccctcgctggaccaaattgctgcccatccctggatgctggggacagagggcagcgttccagagaactgtgaccttcggctctgtgccctggatactgatgacggagccagtaccacttccagcagtgagagcttgtgaggaggaggaggggcctggactccacactgggggcctgggctcagcctagccagccctctcccagaatgaacattttctgcctgggatgtctcctgcaaaagcagtgacctctgacccctggtgacctttgctctcggcaccgggcctgtttcctttgctttgagtgcctttttgaacgctgctccacagggcctgggttttcttgagctcttctgtccaaagatggctgcgggctaagcaaggtcccgcctgccctgggtggatacttgaacccgagaccctaccctgctgctccatcttgcggcagccttcctgaccaagtgtgtttgacatggagcgccctgtggtgcccacctccaaccctccagtctcctggtcttcgtctgggcatgtctgcacaagcaatgcaacgctgggccactgctgcccgcctgcctccctggcaccgcacgcaacgagcgtgccacggtctcttatttatggtgtgatcaccctggagggcgcccctgccctgctggggctatttattgtttaatttatttgctgaggttacttcctccaagcaaccaccttctccaggcccctggggtgttcaggaaagccaagggtggccgttcagtccacagacggcatcctggttcctgcacctgcagtaggtccctaaccccatgtttgtgggaggaggaatttgtacagtggctaatttaaggggagtgggagaccctgtcaccctgggcactctgcgctggggagggggtttaaattattgaccttgtacagtctgcttgctggctctgaaagctggggtgggggacagagtctcaagcccttaatttattttagcaactgtgttctgtgaccctggtgtgagtaggcatcaggggtggggttgtataagttcaaaagtgtgaaatgtctggagatcatattttttatacaggtatttcaattaaatgttttggtatat

SEQ ID NO: 3500 - DNA, 1318 bp, Rattus norvegicus
  Genbank Accession No. NM_022606
cgccgcccaggctagcgcgagcctccgctccatcgccccgccgccatggacctattcggggacttgccggagcccgagcgcccgccgcggccgtctgccgggaaagaagcacaggaaggacccgtgctcttcgaggacctgcccccgaccagcagtactgactcaggatctgggggacctttactctttgatggtcttccacctgctggcagcggcaattcaggttctcttgccacatcaggctcccaggtggtgaagaacgaaggaaaaggagcaaagaggaaagcccctgaggaagagaagaatggcggtgaagagcttgtggaaaagaaagtttgtaaagcctcttcggtgatctttggtttgaaaggctacgtggcagagcggaagggtgagagggaggagatgcaggacgcccatgtcatcctgaatgatatcactcaggagtgtaatcctccatcatctctcattactcgggtttcatactttgctgtttttgatggacatggaggaattcgagcctcgaaatttgctgcacagaatttgcaccagaacttaatcaggaaatttcctaaaggagatgtaatcagtgtggagaagactgtgaagaggtgcctgctagatacttttaagcacaccgatgaagagttcctgaaacaggcttcaagccagaagcctgcctggaaagacgggtccactgccacgtgtgtcctggctgtggacaacatcctgtatatcgccaaccttggagatagtcgggcaatcctgtgtcgatataacgaggaaagtcaaaagcatgcagccttaagcctcagcaaagagcacaatccaactcagtatgaagagcgcatgaggatacagaaggctggaggcaatgtcagagatggccgtgtcttgggtgtgctggaggtatcccgctccattggagatgggcagtacaagcgttgcggggtcacatccgtgcctgatatcagacgctgccagttgacccccaatgacaggttcattttgctggcttgtgatgggctcttcaaggtctttaccccagaagaagctgtgaacttcatcttgtcctgccttgaggatgagaagatccagacccgagaagggaagcctgctgttgatgcccgctatgaagctgcatgcaacaggctggctaacaaggcagtgcagcggggctcggcagataacgtgacggtgatggtggtgaggataggacactgaggccgcacactgcacgtgtgctcttgacttgcaggttcatcttgtttgtgcacgctgtgtgtactcctgtggggcttctatggttgtaaataaa

SEQ ID NO: 3501 - DNA, 378 bp, Rattus norvegicus
  Genbank Accession No. NM_022647
atgcctgagcccgccaagtcccgtcccgccccgaagaagggctccaagaaggctgtgaccaaggcccagaagaaggacggcaaggaacgcaagcgcagccgcaaggagagctactcggtgtacgtgtacaaggtgctgaagcaagtgcacccggataccggaatctcttccaaggccatgggcatcatgaactcgttcgtgaacgacatcttcgagcgcatcgcgggagagcgtcgcctggcgcattacaacaagcgctcgaccatcacgtcccgggagatccagacggccgtgcgcctgctgctgcccggggagctggccaagcacgcggtgtccgagggcaccaaggcagtcaccaagtacaccagctccaagtga

SEQ ID NO: 3502 - DNA, 2748 bp, Rattus norvegicus
  Genbank Accession No. NM_022667
ccggaagcccgaagcaccggagtcccgcagaacctgactccggcctgtcaccaccaccaaaggctaggggacgtcgcctcggtcactatggggctcctgctcaagcctggagcgcgccagggcagcggcacctcctcggtcccagacagacgttgtccccgctccgtcttcagcaacattaaggtatttgttctttgccatggcctgctacagctctgccagctgctctacagcgcctacttcaagagcagtctcaccacaatcgagaagcgctttgggctctccagctcttcctctggtctcatctccagtttgaatgagatcagcaacgctaccctcatcatcttcattagctacttcggcagccgggtcaaccgcccacggatgattggcatagggggtctcctcctggctgcaggggcctttgtcctcaccctcccacacttcctgtcagagccctatcaatacacctcgaccacggatggaaacaggagcagctttcagactgacctctgtcagaagcatttcggagccctgccccccagtaagtgccatagcaccgtgccagatacccacaaggagaccagcagcctgtggggcctgatggtggttgctcaactactggccggcattgggacagtgcccatccagccctttgggatctcctacgtggatgactttgccgagcctaccaactcacctctgtatatctccatcctattcgccatcgctgtgttcggaccggctttcgggtacctgctgggctcagtcatgctgagaatcttcgtggactacggcagagtggacactgctaccgtaaacctgagcccaggtgaccctcggtggattggagcctggtggctgggcctgctcatctcctcaggcttcttgattgtcacctctttgcccttctttttctttccccgagcaatgtccagaggagcagagaggtctgttaccgcagaggaaacaatgcagacggaggaggacaagtcaagaggctccctgatggatttcattaaacggttcccccgcatcttcctgaggctgctgatgaacccgctcttcatgctggtggtcctgagccagtgtaccttctcctcagtcatcgctggcctctccacgttcctcaacaagttcctggagaagcagtatggagccacggcagcctatgccaacttcctcatcggtgctgtaaatcttccggctgcagccttggggatgctgtttggaggaatcctcatgaagcgttttgttttccctctgcaaactatcccccgagtggctgccaccatcatcaccatctccatgatcctctgtgtacctctcttctttatgggatgctccacatcagccgtggctgaggtctaccctcccagcacatcaagttctatacatccgcagcagcctcctgcctgccgcagggactgctcgtgcccagattccttcttccacccagtctgtggagacaatggagtcgagtacgtttccccttgccacgccggctgcagcagcaccaacacaagctcagaagcttctaaggaaccgatctacttgaactgcagctgtgtgagtggaggatcggcgtcacaagacaggctcatgccccacgtcctgcgcgcactactgctcccgtccatcttcctcatttcctttgcggcgctcattgcctgcatctcccacaacccgctctacatgatggtccttcgcgtggtgaaccaggatgaaaagtcgtttgccattggggtacagttcttgttgatgcgcttgctggcctggctgccggctccatccctttatggcctcctcatcgactcctcctgtgtccggtggaactacctatgctcagggagacgaggggcctgtgcgtattatgacaacgatgctctccgaaacaggtacctgggcctacagatggtctacaaggccttgggcacactgctgctcttcttcatcagctggaggatgaagaagaacagggaatacagcctgcaggagaacacctcaggcctcatctgaccctcagctgggactactgccccaccccagagactggatcctatcccttccacacctacctgtattaactaatgtcaacatgccttcctcctcctcttcctcctcctcctcctccttcttcttcctctctctctctctctctctctctctctctctctctcacacacacacacacacacacacatgagagagagttcactcaccctttgagatcacctgccttttctcttctgcctaaagtcttaaggcctgaagtacactgagctgaatgagcaccgggcctgagagtttagtttctccaagtccttggaaggtatccccagcgtaggccctacgtcctccagacaagatgcccataatgaggcggcctctgttttcaccagtgtctcaggaatacttaatggagtgaaaagagggagtcttgccttcttgggccaggcagcccggatctcctctgcctctgcccacacccaggagagccagaggagaagcaggtagttggtttcttatctgctccagcggggctaagggagctgggtgtgtccacttttcatctggattccgtctagcatgaaagccgtgccctcgaggctgttttggaaaccaccattttgggaagtatccctctctataaactatgccccggtatctgaggaggaatgaagggaggaacaaggctggatcatggaaaactgttcacaggaaccagaggcctatcctcccgtcggg

SEQ ID NO: 3503 - DNA, 492 bp, Rattus norvegicus
  Genbank Accession No. NM_022672
ctttccggtggaggagtctggagacgacgttcagaaatggcacctcgcaaggggaaggacaagaaggaagaacaggtcatcagccttggacctcaggtggctgaaggagagaatgtatttggtgtctgccacatctttgcatccttcaatgatacctttgtccatgttactgatctttctggcaaggaaaccatttgccgagtaactggtggaatgaaggtgaaggctgaccgagatgagtcctctccgtatgcagccatgttggctgcccaggatgtggcccagaggtgcaaggaactgggcatcactgccctgcatatcaaactccgggccacaggaggaaacaggaccaagacccctggacctggagcccagtcagccctcagagctcttgctcgctctgggatgaagattgggcggattgaggatgtcacccccatcccctctgacagcactcgaaggaagggtggtcgtcggggtcgccgtctgtga

SEQ ID NO: 3504 - DNA, 377 bp, Rattus norvegicus
  Genbank Accession No. NM_022686
acttttactcacaaccatgtctggacgtggtaaaggtggtaaagggcttgggaaaggtggcgctaagcgtcatcgcaaagtcctgcgcgacaacatccagggcatcacaaagcccgccatccgccgcctggcccggcgcggaggagtgaagcgcatctccggcctcatctacgaggagacccgcggtgtgctgaaggtgttcctggagaacgtgatccgcgacgccgtcacctacacggagcacgccaagcgcaagacggtcactgccatggacgtggtctacgcgcttaaacgccagggccgcacactctacggcttcggtggttaaactgctaatgcgctttccttagctgttgcaaaaggcccttttcagggcc

SEQ ID NO: 3505 - DNA, 964 bp, Rattus norvegicus
  Genbank Accession No. NM_022687
gtggatgcaggccctgcttgcaactggctttgagcaaccacaggcagaaaattgctacattgtcctgacattagggcgactaattcagcatcccagcgtggccagagcgtgaagggagcagaaaagcatcactggccagcatcctcgcctcagcatctttatcaggcctcaggacacctagcgccccaccatcatcatttaggatggaccccagctcacacagctccctgccataacggaggaccaccagaagaatgttggatctccaagcctctgatggagaagaagcgtcgtgcccgcatcaacctgtcactggagcagctaaggtctcttctggagagacactactcccaccagatacggaagcgaaagctggagaaggccgatatcctggagctgagcgttaagtacgtgagaagcctccagaactcattgcaaggactttggctagtacccagtggggtggactacccgtccggattccgaggcggcttgccgggctccagccagaggcttcggcccggagaggacgacagcggcctgcgctgccccctgcttctccagcgcagggcaggcagcaccacggacagcgccaacccacagacggcctctgttctcagcccctgcctcccggccatctgggcccctggtccccctgcaggtggctcccaatccccgcagtccccgttccctccccttggaggtctccttgagtcctccactggcattctggcaccgccacctgcatcaaactgccaggccgagaatccgagacccgggtttcgcgtgtggcggccctggtgaggcctaggcaagaatttagattcaagccctaacctctgcccttatcacctcgccgtctagtttgggggaaactatttggggacacccatggtgactgcagggactctatcaatcggtggcctggtggggctgcagggaaatacacggagccatttgctga

SEQ ID NO: 3506 - DNA, 633 bp, Rattus norvegicus
  Genbank Accession No. NM_022689
atggatgatctatcaccagaagaaattcagcttcgggctcaccaagttactgatgagtctctggaaagcacaaggagaatcctgggtttagccattgagtctcaggatgcaggaatcaagactatcactatgctggatgagcaaggggaacaactaaatcgcatagaagaaggcatggaccaaataaataaagacatgagagaggcagagaagactttaacagaactcaacaagtgttgtggcctctgcgtctgcccttgtaataggaccaagaactttgagtctggaaagaactataaggcaacatggggtgatggtggagacagctcacctagcaatgtggtatctaagcaaccaagccggataacaaatggtcagcctcagcagactacaggagcggccagcggtggatacattaaacgcataactaatgatgccagagaagatgagatggaagagaacctgactcaagtgggcagcatcctagggaacctaaagaacatggctctggatatgggcaatgaaattgatgctcaaaaccagcaaatacagaagatcacagaaaaggctgacaccaacaagaatcgcattgacattgccaatacaagagcaaagaaactcattgacagctaa

SEQ ID NO: 3507 - DNA, 649 bp, Rattus norvegicus
  Genbank Accession No. NM_022692
catggctaatcgaggagcaacaagacccaacgggccaaatactggaaataaaatatgccagttcaaactggttcttctaggagagtctgctgttggcaaatcaagtctggtgcttcgctttgtgaaaggccaatttcatgagtttcaagagagtaccattggggctgcctttctaacccaaactgtgtgtcttgatgacacaacagtaaaatttgaaatatgggatacagctggccaagaacggtatcatagcctagcaccaatgtactaccgaggagcacaagccgccatagttgtgtatgatattacaaatgaggagtccttttcgagagcaaaaaactgggttaaagaacttcaaaggcaagcaagtcctaatattgtgatagctttgtcaggaaacaaggctgacttagcaaataaaagagctgttgacttccaggaagcacagtcctatgcagatgacaacagcttattatttatggagacatcagctaagacatcaatgaatgtaaatgaaatatttatggcaatagctaaaaagctgccaaagaacgaaccacaaaatccaggcgcaaactcagccagaggaagaggagtagaccttactgagcctgcacagccagccaggagtcagtgttgtagtaactaa

SEQ ID NO: 3508 - DNA, 3166 bp, Rattus norvegicus
  Genbank Accession No. NM_022694
ccgtgcaacggggcatcgtcaagatggtcctctctgggtgtgccatgattgtccgagggctgccccgtggtaccgctccagagaggcagatcaacctcagcaacattcgagctggaaatctcgacacacgtcgtcgagctgctacacaaccagatgggaaagataccccagatgagccctgggcatttcctgctagagagttccttcgcaagaagctgattgggaaggaagtctgtttcacgatagaaaacaagactccccaaggacgagagtatggaatgatctaccttggaaaagatactaatggggaaaacattgcagagtcgctagtcgcagaaggcttggctcccggagagagcatgagagccaataatccagagcagaaccggctttcagaatgcgaggaacaagcaaaggcatcgaagaaagggatgtggagtgaggggacgggtcacacacatccggacctcaagtacaccattgagaacccaaggcactttgtggactcacaccaccagaagcctgtcaatgctatcattgagcatgttcgagacggcagtgtggtccgggccctgctccttccggatcactaccttgttaccgtcatgctgtcagggattaagtgcccaacctttcgtcgagaaacagatggtagtgaaacaccagagcccttcgctgcagaagccaagtttttcacggagtctcgactgcttcagagagatgttcagatcattctggagagctgccataatcagaacattctgggcaccatccttcatccaaatggtaacatcactgaactcctcctgaaggaaggttttgcccgctgtgtggactggtcaattgcagtttacacccggggtgcagaaaagctgagggcagctgagaggtttgccaaggagcgtaggctgagaatatggagagactatgtgcctcctactgctaatttggaccaaaaggacaagcagtttgttgccaaggtaatgcaggttttgaatgctgatgccattgttgtgaagctgagttctggagactacaagaccatccacctgtcaagcatccgaccaccaaggttggagggagacaacatacaggataagaataagaagctgcgtcccctgtatgacatcccctacatgtttgaggcccgggaattccttcgcaaaaagctgattgggaagaaggtcagtgtgactgtggactacattagaccagccagcccagccacagaaacagtgcctgccttttctgagcgtacctgtgccacagtcaccattggaggaataaacattactgaggcccttgtcagcaaaggcctagccacagtgatcagataccggcaggatgatgaccagagatcttcacactatgatgagctgctggctgcagaggccagagcgattaagaatggcaaaggattgcacagcaagaaggaagtgcccatccaccgagttgcagacatttctggggacacccagaaagcaaagcagttcctgccctttcttcagcgcgcaggccgttctgaggctgtggtggagtatgtcttcagtggctctcgcctcaagctctacttacctaaggagacctgtctcatcaccttcctgctggcaggcattgaatgtcccagaggagcacgaaatctcccaggcttggtgcaggaaggagagccattcagtgaggaagccacacttttcaccaaggaactagtgctgcagcgagaggtggaggtggaggtagagagcatggataaggctggcaacttcattggctggctacacatggatggggctaacctgtctgtcttgctggtggagcacgcgctctccaaggtccacttcactgctgagcgcagcggctactataagcctctcctgtctgctgaggaagctgccaagcagaggaaagagaaggtctgggcccactatgaggagcagcctgtggaggaggtaatgcctgtactggaagagaaggagcgctcggccagctacaagccagtgtttgtgaccgagatcacagatgacctgcatttctatgtgcaagatgtggagactggcacccagctggaaaaactgatggagaacatgcgcagtgacatctccagccaccctcctgttgagggtctacgcccacgccggggagagttctgcattgccaaatttgtagatggagaatggtaccgcgcccgggtagaaaaagaggagtcccctgccaaagtgcatgtcttctacatcgactatggcaatagagagatcctgccatccacccgcctggccctaccacctgccttcagcactcgcgtgttgccagctcaagccacagagtatgccttcgccttcatccagtggccccaagatgaggacgctcgcacagatgctgtgacagtgtgtgcggacatccaaaacactcagtgcctgctcaacgtggagcacctgagtgccagctgcccccatgtcactctgcagtttgcggattccaaaggtgatgtggggctgggcctggtgaaggaaggactcgtcatggtagaagttcggaaggagaagcagttccagaaagtgatcacagagtacctgaatgcccaggaatcagccaagagtgccaggctgaacctgtggcgctatggcgacttccgagctgacgatgctgatgagtttggctacagtcgctaaggagaacttgcctggctcccagcaccgatgatgccagaccttctccctctgccaggaagccgttttcaactccagacctggtcgggggagtatagattgggtccagcttgcttcagacagaaacctcctctgtcgcgggtagcattggagctggggtggagagcccaaggcttgctggggcagacccctcagtggtactgccgtccagtctctcccagatgattttgtatttttatttaattgtcttcaaatcaggaaagaaccatgaaagactgtgtgttagtgaagggtataatcgtgacacagaggcagctgtcagctggcacccacctctcccccagaccacccttcttcccaagctctgtccaagtgttgattatgtgacttctgatacatccgttctcaaattccagtgtgcccatatctgcccccacaccagcctgttctgtatttaaagcttttgagacccaataaaatagtacctgctgtctgcaaaaaaa

SEQ ID NO: 3509 - DNA, 466 bp, Rattus norvegicus
  Genbank Accession No. NM_022697
ctttccgtctccggccgccgcaggagaggagtcgccgccatgtccgcgcatctgcaatggatggtcgttcggaactgctccagtttcttgatcaagaggaataagcagacgtacagcacggagcccaataatctgaaggcccgaaactccttccgctacaacgggctaattcaccgcaagacggtcggagtggaggcctggcctgatggcaaaggggtcgtggtggttatgaaacgcagatccggtcagcgaaaacctgccacttcctacgtgaggaccaccatcaacaagaatgctcgggctaccctcagcagcatcaggcacatgatccgaaagaacaagtaccgccctgatctgcgtatggcggccatccgcagagccagtgccatccttcgaagccagaagcctgtggtggtgaagaggaaacggacccgccccaccaagagctcctgagccccacaccccg

SEQ ID NO: 3510 - DNA, 1015 bp, Rattus norvegicus
  Genbank Accession No. NM_022698
atgggaaccccaaagcagccctcgctggctcctgcacacgccctaggcttgaggaagtccgatcccggaatccggagcctggggagcgacgcgggaggaaggcggtggagaccagcagcccagagtatgttccagatcccagagtttgagccgagtgagcaggaagacgctagtactacagataggggcctgggccctagcctcactgaggaccagccaggtccctacctggccccaggtctcctggggagcatcgttcagcagcagccgggacaggcagccaataacagtcatcatggaggcgctgggactatggagacccggagtcgccacagttcgtacccagcggggactgaggaagatgaagggatggaggaggagcttagcccttttcgaggacgctcgcgctcggctccccccaatctctgggcagcgcagcgctatggccgtgagctccgaagaatgagcgatgaatttgagggttccttcaagggacttcctcgcccaaagagcgcaggcactgcaacacagatgcgacaaagcgccagttggacgcgcattatccagtcctggtgggatcgaaatttggggaaaggaggctccactccctcccagtgatctgctccacattcccggaattctacccgctcccatcgcccgccatattgggtgtgggcggaagtctttcgaggccttaggaaaaaaggatcgctgtgtccctttaacagggagaagagctgacgtacagcgttgagttccttccggtgcgtgcaatagccatggaggggtggcccttgctttggagttttcaaagttttccacacaccctaccccctacgcctccggaagtggctatgttccctctccgttactggacagccctcaggcgcctgtgctaagttgcgagtcctggtaaaccgagactgggtgctgtcctatcatcctagctggaggccccaggtcaagaaacgtgctttataataaagcccgcgcatgtgtaaaaaaaaaaaaaaaa

SEQ ID NO: 3511 - DNA, 392 bp, Rattus norvegicus
  Genbank Accession No. NM_022699
atggtggctgcaaagaagacgaaaaagtctctggagtcaatcaactctaggctccaacttgttatgaaaagtggaaagtacgtgctggggtacaaacagactctgaagatgatcagacaaggcaaagcgaaattggttatcctcgccaacaactgtccagctttgaggaaatctgaaatagaatactatgccatgttggctaaaactggtgtccatcactacagtggcaataacattgaattgggcacagcgtgtggaaaatactacagagtatgcacactggctatcattgacccaggtgattccgatattattagaagcatgccagaacagactggtgagaagtaaacaagaaagttctcctttaataaaactttgccagagctcctttt

SEQ ID NO: 3512 - DNA, 2157 bp, Rattus norvegicus
  Genbank Accession No. NM_022701
gaatctgttggcacggaggaagaagtccctggggaatcttaggactgtcacaggggcgctcaagggactgggcggtggcagaggcagttctcctgataggagggggaagaggtgccacagggccccttcccctctgcaaaggcttcttctctctcccctccagttgcagcctcaactatgtttttcacttgtggcccaaatgaggccatggtggtctccgggttctgcaggagccccccagtcatggtggccggaggccgagtgtttgtcctaccctgcattcaacaaatccaaaggatctctctcaacacactgaccctcaatgtcaagagtgagaaggtttatacccgccacggggtccccatctcagtcacgggcattgcccaggtgaaaatccaggggcaaaacaaggagatgctggcagctgcctgccagatgttcctggggaagacagaggcagagatcgcccacattgccctggagacgctggaaggccaccagagggcaatcatggcccacatgactgtggaggagatctataaggacagacagaagttctcagagcaggttttcaaggtggcctcctccgacctggtcaacatgggtatcagtgtggttagctacactttgaaggacattcacgatgaccaggattacttacactctttggggaaggctcgcacagcacaagtgcagaaagatgctcggattggagaagcagaggccaagagagatgcggggatacgggaggctaaggccaagcaggagaaggtatccgcacagtgcctcagtgaaatagagatggccaaggcccagagggactatgagctgaagaaagccacctacgacattgaggtcaacacccggcgagcacaggcggacctggcctatcagctgcaggtggccaagacgaagcagcagatcgaggagcagcgggtacaggtgcaggtggtggagcgcgcccagcaggtggcagtgcaggagcaggagatagcaaggcgcgagaaggagctggaggcccgggtgcgcaagccagcggaggctgagcgctacaggctggagcgcctggcggaagcagagaaggcccagctgatcatgcaggcagaagctgaagctgagtctgtgcgggtgagttggggcatggcttctgattggcatgaggggagggcttatcagggtttcttgttctctattgcttgttttttgtcctggctgacctggaactcactgtgttaacaagatggcttcaaactcggggagatccatctacctctgcctcccaattactgggattaaaggcattcacaactgttgttgctgtcgctgttgctaacctcctcccttcttccctccttctcctcctccttctccccctctccccacgccccatgtaggaggcagggtggttcatcttgccagtgtggaggtcagatccccctggagattttaagtaaggttgttggcctgactggcaagcacctttaccctctgagtcttattggcctcagaatttggtatccttaatgagttgcctgcccgtaccctccacagatgcgaggggaagctgaggcctttgccgtaggggcccgcgctcgtgctgaggctgagcaaatggccaagaaggcagaagccttccagatgtaccaggaggccgcccagctggacatgctgctggagaaactgccccaggtggcagaagagatcagtggccccctgacctcagccaataagatcacgctggtgtctagcggaagcggaaccatgggggccgccaaagttactggggaagtactggacatcttaagccgtctgccagagagtgtggagagactcacaggcgtcagcatctcccaggtgaatcacaacaagcctttaaggacggcgtgagcccttccaagttcccaatggtacctggacatgtggcccaatggtctcattgcatgcgcctcagttggcctccctgagcatgaccccctgccaagggtgcacatctctccttgccaaatagtctgtgccttgccttggagggcttgctctccgcccatttgccagtgccctgcaccaagactttggttatcttacttcaccccaactatttaacttcctgattaaacgagactgagccctctgggtagctataaaaaaaaaaaaaaaaaa

SEQ ID NO: 3513 - DNA, 1037 bp, Rattus norvegicus
  Genbank Accession No. NM_022704
ggcgggggagagttccaggttgaagagactcttccttgcccctgaatctttgctgtttcaaaaccttggaataccatttttggatttgggctgcagaccgtggcacacatgtgagatccttcggaacacagtgtctccggtcatcctcaacccctaagccatccgacactggtgaggaccatgtccctgttcacatccttccttctgctctgcgtgctcacggcagtctatgccgagaccttaaccgaaggggctcaaagtagctgccctgtgattgcctgcagttctccggcctggaacggcttcccaggcaaagatggacacgacggtgccaagggagaaaagggagaaccgggtcaaggcctcagaggcttgcagggccctcctggaaaagtaggacctgcagggcccccagggaatcctgggtcaaaaggagcaacgggaccaaaaggagaccgtggagagagtgtagaatttgatactaccaacattgatttagaaattgcagccctgcgatcggagctgagagctatgagaaagtgggtgctcctttctatgagtgaaaatgttggaaagaagtacttcatgagcagtgttagaaggatgccccttaacagagcgaaggctctgtgctccgaactccagggcactgtggccactcccaggaatgctgaggaaaatagggccatccagaatgtggccaaagatgttgccttcttgggcataacggaccagaggactgaaaacgtttttgaggacctgacaggaaacagagtgcgctacactaactggaatgagggtgagcccaacaatgtgggctctggggaaaactgtgtggtgctcttgacaaatgggaagtggaatgacgttccttgctctgattcctttttggtagtttgtgaattctctgactgagggtgcttgtttctcatccctccttgatacttcagtgtattctataagtccacagtttgttctgaaaatataggcaattcaacattggttaccaattaaactgtaacatttttcagaatagc

SEQ ID NO: 3514 - DNA, 975 bp, Rattus norvegicus
  Genbank Accession No. NM_022706
cccgcctgccgagtagtcgtcgctgccgccgccgcctccgttgttgttgtggtcgcttcgccgaagtctgcggctcaaagagccggctccgtcgcttcccgccgccatgaagtggatgtttaaggaggaccactcgctggaacacagatgcgtggaatccgcgaagatcagagcgaaataccccgaccgggttccggtgatcgttgagaaagtctctggctctcagattgttgacattgacaagaggaagtacttggtcccatctgacatcactgtggctcagttcatgtggatcatcaggaaaaggatccagcttccttctgagaaggccatcttcttgtttgtggacaagacagtcccacagtccagcctaactatgggacagctttacgagaaggaaaaagatgaagatggattcttgtatgtggcctacagcggagagaacacttttggcttctgagcccttgctgggctaggtgcacccttcctgcttgtgtatcctgtaaataactggctgttctcagttactccgccggagcctccacacagacctactagtgcatttgtaactggatttatttcttaatatattggaaggttttgttttccttagattagtaaattatcatacagagttttattttcagttttcttttgtgcactgtcctcatggctatatgctccaaggaacctgtcctccggaatcacatttaatgaagatacttccgaaatgaagggcggtaggtgtggtattaaagtgacaaggagggatgacgcattgttctggattatgttcggagtgttagacggctaagtattaaaagcccccaaattaaatccttagcaatcagaacacttgcttcactagattttgccaactgcaaatcatgttggactgagctaatctgttctttctgagactataaggtaaatgattaacaataaagcctccatgtaaaaggcaaaaaaaaaaaa

SEQ ID NO: 3515 - DNA, 3239 bp, Rattus norvegicus
  Genbank Accession No. NM_022866
cgggccgcccggtctccggcgatcgcgcggatggcggcgctggcggcgctggccaagaaggtgtggagcgcgcggcgcctgctggtgctgctgctggtgccgctggctctgctgcccattctcttcgccctgccgcccaaggaaggccgttgcctgtatgtcatcttgctcatggcggtgtattggtgcacagaggccctgcccctgtcagtgacggctcttctgcccatcatcctcttccccttcatgggtattctaccctccagcaaggtctgtccccagtacttcctcgacaccaacttcctcttcctcagcggcctgatcatggccagtgccattgaggaacggaacttgcaccggagaatcgccctcaaggtcctcatgctggttggggtccagcctgcaaggctcatcctggggatgatggtgaccacgtcattcctgtctatgtggctgagcaacacggcttccaccgcaatgatgctgcccatcgccagtgccatcctcaagagcctctttggccagcgcgacactcggaaggaccttccccgggaaggcgaggacagcacagctgctgtgcggggaaatggacttcgaacagtgcccacggagatgcagtttctcgccagttcagaaggaggccacgctgaggatgtggaggccccactggagttgcctgatgactccaaggaggaggaacatcgcaggaacatctggaagggcttcctcatttccattccctactcagccagcatcgggggcaccgccaccctcacaggcacagcccccaacctcatcctgctcggccagctcaagagtttctttccacagtgtgatgtggtaaattttggctcctggttcatcttcgccttccctctcatgctgctgttcctactggtgggctggctctggatctctttcctctacggtggaatgagctggaggggctggagaaagaagaactcgaagttacaagacgttgcagaggataaggctaaagctgtgattcaggaggagttccagaacctagggcccatcaagtttgctgaacaggctgtcttcatcttgttctgcttgtttgccatcctcctcttctcccgggacccgaagtttatccctggctgggccagcctcttcgcccctgggtttgtttcagatgctgtcaccggtgtggccattgtcaccatcctgttcttcttcccttcccagaagccctcactcaagtggtggtttgacttcaaagctcccaactcggagacagagcccctgctgagctggaagaaagcccaggagacagtgccctggaatatcatccttctcctgggaggtggctttgccatggccaaaggctgtgaggagtcggggctgtctgcgtggatcggtgggcagctgcaccccctagagcatgttcccccactgctggctgtgctactcatcactgtggtcatcgccttcttcacagagttcgccagcaacacggccaccatcatcatcttcctgcctgtcctggcagagctggccatccgactgcacgtgcaccccttgtacctgatgatcccgggcacggtcagctgttcctacgccttcatgctgccggtctcgacgccccccaactctattgccttctccactggacacttgctggtcaaagacatggtgcggaccggccttctgatgaacctgatgggtgtcctgctgctcagcctggccatgaacacctgggcacaggccatcttccagctgggcaccttcccagactgggccaacacccacgctgccaatgtgaccgcactgccacccgccttgaccaacaacacagttcaaaccctctgaacactgatggggacttctttttccggctgggcgttcctcccagcgggttgttgctgttgttgctgctgggatcctacaagctgatcgagtaattcttccctgtaatctgctaggaggctgccagccaggttccctgggccacaggctcactgtctgcagcgccttctctttctttctcatgcatttcaaagctaactcctgcacctgatgcctgaggaacaggcttttctcaccgagctggtctgtggccacggtgtggggaaagtccacttgagccacaagctgaaatggcgaggctgaagtggtgtttgttttgcaacacctagggtcgagggtatcgagacaggaggagctatgtgactgcaaagctccagatgttacagatgttcacagctggctggattctgccttttctgtttaaccatctcccttgcagatgatacctggcagctagaggtcggcttccattgcctgaggcggagggagtacacaggtcttcctggagtctctctgctgcttccccaatctcgcaagcagcacaccatggggtttgaaaaactccaactcacacatctatccaagatgcctgggattctctttttttcatctgattctcttaggaccaagctctaggtcagccttgctcattatccttctagggccctcctgtctgtggcccgtggggaagggctctgtggctgcagaccaccagctgtttttactctaacaactgggtttggcctccccgcccccccccccccgccccacatgatcagtaagttctatttgcaaaggccacagtcttcaggggtgagagaaaaatctgaaagacgtggagacctgtgagaaaaccagggcaaagtatctcaggccagaagtgtgctgtaacattgtgacattgtaacatcctgcagatggagaccccacccccacccccagtccccttccaccagaggccgaagcctgaaagcagacagttgctgtccttattcccagtaaaagcctctgatactctgcgaacagcacactgtggggacagtgggcagctcggaactcggctgacaccagaggtggaaccatcacttcctccagagggtggacatccgaaggatggacactttctgttaaggcacaagtgagtcagagtattttcccagagctgggctggagggggcctgagctggaagtgacactgtaagactgagtcagcaccccctgggtctggatagtgggatccctcaggggacaaggacgggcatacacagagaagaccatggccttgtgaccacaggattcatgatttctgatactgctgatccaatatgcgctcaaataaataaagactgttagtcaatactggaaaaaaaaaaaaaaaaaaaaaaaaaaaaaaaaaaaaaaaaaaaaaa

SEQ ID NO: 3516 - DNA, 861 bp, Rattus norvegicus
  Genbank Accession No. NM_022867
ggcacgagccaggacccccgcgcgccatgccgtccgagaagaccttcaaacagcgccggagcttcgaacaaagagtggaagatgtccggctcatccgggagcagcaccccaccaagatcccagtgattatagagcgatacaagggtgagaagcagctgcccgtcctggacaagaccaagttccttgtacctgatcacgtgaatatgagcgaactcatcaagataattagaaggcgcctgcagctcaatgctaaccaagccttcttcctcctggtgaatgggcacagcatggtgagtgtgtccacacccatctctgaagtgtacgagagcgagagagatgaagacggcttcctgtacatggtctatgcctcccaggagacgttcgggacagcactggctgttacatacatgtcagctctgaaggcaacagcaacaggaagagagccatgcttgtgacagacatacagccacttccaactaaagcaagcctctgcttcctgctacctgcatggagcccactgtgacactcagaccatccccggtcactcactcgtgtctgagaatctcagtgagagctgcctctgtcacggaccggaagccaacacagccacctctcgacctgctccccacagcacccaccctccctgcatgcaagctgtccctgctaacccccaatgttatgttacactgtgtaaatccccactgctgccgtgtgtgggttgtgtacgtcgtcatgtccctggtttataactatggtgcggtcgggaaggattcctgtaatgctgctctaaggatctggctcaggcagccattgtaggacacctgtactctgatgcactaagtccaataaaggcacaactgg

SEQ ID NO: 3517 - DNA, 3609 bp, Rattus norvegicus
  Genbank Accession No. NM_022869
gttcttcagtcgtaccgcgtgcgcaacggtagtgacgcgtttaacccggagtatggcggataccggcttgcgccgcgtggttcccagcgacctttatccccttgtgctcggctttctgcgagataaccagctctcagaggtggccagtaaatttgcaaaagcgacaggcgctacacagcaggacgccaatgcctcttccctcttggacatttatagcttttggctcaagtccaccaaagccccgaaggtgaaactgcagtcaaatggaccagtggccaaaaaggctaagaaagagacttcatccagtgacagcagtgaggacagcagtgaggaagaggacaaagcccaagttcccacacagaaggctgccgcccctgccaagcgagccagtttgcctcagcatgctgggaaagcagcagccaaagcttcagagagcagcagtagtgaagagtccagtgaggaagaggaggagaaggacaaaaagaaaaagcctgtccagcagaaagcagttaagccccaagccaaggcagtcagacctcctccgaagaaggcagagagctctgagtccgagtctgactcaagctcagaggatgaagcaccacagacccagaagccaaaggcagctgctacggcagctaaagccccgactaaagcccagactaaagccccagccaaaccaggtccaccagcgaaagcacagcctaaagcagccaatggcaaagcaggcagcagcagcagcagtagcagcagcagtagcagtgatgactcagaggaagagaagaaggcagctgcacctctcaagaagactgcacctaaaaagcaagtcgtggccaaggcaccagtaaaagtaactgctgcccccacccaaaagagttctagcagtgaggactcttccagtgaagaggaagaggaacagaaaaaacccatgaagaaaaaagcaggtccctacagttcagttccaccaccttctgtttctttatccaaaaagtccgtgggagcccagtctccaaagaaagcggccgcgcaaacacagcctgcagacagcagtgcagacagcagcgaggagtctgattcaagttctgaggaagagaagaaaactccagctaagacagtcgtctccaagacacccgccaaaccagctccagtgaagaaaaaggccgagagctcttcagacagctcagattctgacagttctgaggatgaagctcctgccaagccagtcagtgccaccaagagtcccttaagcaagccagctgtcactcctaagccgcctgctgcaaaggcagtggcaactcctaagcagcctgcgggcagtggccagaaacctcagagcagaaaggctgacagcagctccagcgaggaggagagcagctccagtgaggaagaggccaccaagaaaagtgtgacaacccctaaggccagggtgaccgccaaagcagcaccctctctacctgccaaacaggctcctcgggctggtggagacagcagctccgactcagagagttccagcagtgaggaggagaagaagacgccgcctaaaccccccgctaagaagaaggcagcaggtgcagccgttcccaaacccacccctgtgaagaaagcagcagccgagagcagcagcagcagcagctcctccgaagattccagtgaagaagagaaaaagaagcccaagagcaaagctactcccaaaccacaggcaggaaaggccaatggcgttccagcttctcagaacggaaaagcaggcaaggaaagtgaggaggaagaggaagacacagaacagaacaaaaaggcagccgggaccaagccaggttcaggcaagaaacggaagcacaatgagacagcagatgaagcagcaactcctcaatctaagaaagttaagctgcagacccctaatacgtttccaaaaaggaagaagggagagaaaagggcatcttcccctttccgaagggtcagggaggaggagattgaggtggactctcgagtagcagacaattccttcgatgccaagcgaggtgcagctggagactggggtgagcgagccaatcaggttctgaagttcaccaaaggaaagtccttccggcacgaaaaaacaaagaagaagcgaggcagctaccggggaggctccatctctgtccaggtcaattccgtcaagtttgacagcgagtgacctgtgtcatctttagcaaaggaagggtgactttgggaggctggcactcacctccaatggacccagaaactcagtgttattaggagagagttgtggcacggacagtttgaagcaggttctttgacactgcagtctatagtccttccatgctcctgcttctggacaggtttgtttttgagcgttgattgtcaaagacaaaaagtttttttgtttgttttgttttattttttaagaaatccatttggttgtcagctgccttcctgttctgttggtcttcatactgagaaattgtatattttatattaaatcatgtcatacagatttttgttgtgattttcagagatgagttccacagattaaagtctttgcctaaggcaatgcacagagtcacatggaggattctgtttatgtgagtgcgcagacccacatttgatcccacccctcaaagccccggtgggccctgacataagtcttgtgatgtttgactgctaagcatgccctgtgctcatcttcatccattgggcctgacaccgaagcttcccgaagccggcgtggatctgccaactttggggataaaattgcagttcttggtacaatttcctactgaactgacaggcaggattctcgatgtgagtgcgatgcaacggtttttgttttgttctcagtagctattagtgctacgtgtttacagtgtgttctagttttaatttcgaagtaagcttttctgacactgagaggcatttgcaacaacttgactcttaccgctgttgtatataagctcatgaatatatttgattcttgttaacatcatcaagagcagaatggtaaactcctgcatggttgaggcactggtcaaggaagtggagatgacctacctgagcctctgggtgaagtaggtacggtggatagatcctgggcacctgcagtgaggagcaggcgaaggacagtgaggctgggagaggtctgggcaggaccgttctgtctggatccctcccctcaaagggatcacatgggagtggttatgtcttatttaagttggtcccctggattgattattggtaccttaactatatgatgttactgatacaggctaaccagggggggctgggaggcatatctgggtgatagtggcgcttacctaccattcaaggacagagtgtgatctccatcaaggcaggaagtgaatgagcagagatccctgggccaagggagtaaattataaagccgtaagatttgaccattggcagagctcagccagagtgagggaagggagaagagcaccctggctaacctggtgagaacagacacggagcctccctggtttggtttccatggtcacctggtaacctgctaaaagtgggtgcctgtggcagctccttgaggaagtctgcatggtcaaagttctgtgtcttactacaaaacaataaaatggatggtccctg

SEQ ID NO: 3518 - DNA, 1341 bp, Rattus norvegicus
  Genbank Accession No. NM_022921
catccatcagggctaccacgggaaggatggcgatctcaaacaagttctctctcctgctgatggtggtggtcgctctggctgttagccgaacaggtgctggcacacattcactgcgttatttccacactgccctgtcacggccgggccgtggggagcctcaatatatttctgtcggctatgtggatgacaagctgtttcagcgctgtgatagcgttgaggagattccgaggatggaggcccgtgcaccttggatggagaaggaaggaccagagtattgggaggagctgaaactcaaagtaaaaagcattgcacaaagagccagagcaagacttcggaccttgatccgctactacaaccagagtgaaggcggttctcacatcctgcagtggatggttgcctgcgaggtggggccagacatgagacttcttggagcacactatcaggctgcatatgacggctcggattacatcaccctgaatgaggacctgagctcctggactgcagcagacatggtggctcagatcacgaagagcgagttagagtcagaaggtagagcagaatacttcagagcctatgtggatggagagtgcctggagctgctccatagattcctgcagaatggaaaagagattcttcagagagcagatcccccaaaggcacatgtgacccttcacccaagacctgaaggtgatgtcaccctgaggtgttgggccctgggcttctaccctgctgacatcaccctaacctggcagttgaatggggaggacctgacccaggacatggagcttgtggagaccaggccttcaggggatggaaccttccagaagtgggcatctgtggtggtgccttctggagaggagcagaaatacacatgccatgtggagcatgaggggctgcctgagcctcttgtcctgaaatggggaggatcgtctcagtcctttgtcgtcatcatggtcatcatagtaatcattgttattctggctctcctgggaggtgtgctcactgttgttttggtgtacaggaggaggggcgcaggcatgctctgatgcttctctcaccatttagaaagtatgaaagcactgagtgtgtgggactgagtctgttccccataaccgtgttacctcccttttcaccagtaccacagtggaatctgggacttcttcatgccttgtggaactttagttttctatgagcggcttcttccctggtcaaaataagaatgtatatataactttatttttttttaccttcttgttataagaagttggttgtgttattaaaatttgtaaatttgaaagggaataaaagtgaacttacaaccaaaaaaaaaaaaaaaaaaaa

SEQ ID NO: 3519 - DNA, 2045 bp, Rattus norvegicus
  Genbank Accession No. NM_022924
ggctgtggtgaccggaacaagcccggggtctacactgacgtggccaattacctggattagatcccaggagctgacacactatgttgcacgtccgcggcctggggctacctggctgcctggctctggctgccctggctagcctggtacacagtcagcatgtgttcctggcccctcagcaagcactgtcgctgctccagcgggtccgcagagccaacagcggcttcctggaggagctccgaaagggcaacctggagcgtgagtgcgtggaagagcagtgcagctatgaggaggcttttgaggccctggagtctccccaagacacggatgtgttctgggccaagtacacagtgtgtgattcagtgaggaaacctcgagagaccttcatggactgtctagaaggtcgctgtgctatggatctgggtctgaactaccatgggaatgtgagtgtcacccataccggcatcgagtgtcagctgtggcgaagccgctacccacacaggcctgacatcaactccaccacccatcctggggctgacctgaaggagaacttctgccgaaatccagacagcagtacctcagggccctggtgctacaccacagaccctactgtgcgcagagaggaatgcagtatccctgtctgtggtcaggagggccgtaccactgtgaaaatgactcctcgctcaagaggttccaaggagaatctgtcgcctccattgggagagtgcctcctcgagcgtggccggctgtaccaggggaacttagctgtgacaacacttgggtccccctgcctggcctgggacagtttgccaaccaagaccctgagcaagtaccagaacttcgaccctgaggtgaaactcgtgcaaaacttctgccgcaatccagaccgggatgaggagggcgcgtggtgctttgttgcgcagcagcctggttttgaatactgcagcctcaactactgtgatgaagcggtgggagaggagaaccatgacggggacgagtccatcgcaggacgcaccaccgacgcggagttccacaccttcttcgatgagaggactttcggccttggggaggcagactgtggcctgcggcctttgttcgagaagaagtccttgacagacaaaacggaaaaggagcttcttgattcttacatagatgggcgcatcgtggagggctgggacgctgagaagggtatcgccccatggcaggtgatgctttttcggaagagtccccaagagctgctgtgtggagccagccttatcagtgatcgatgggtcctcactgctgcccactgcattctgtacccaccctgggacaagaacttcactgagaatgacctcctggtgcgcattggcaagcactccagaaccagatatgagcggaatgttgaaaagatctccatgctggaaaagatctacatccaccccagatataactggcgggaaaacctagaccgtgacattgctctgctcaagctaaagaagccagtgcccttcagtgactacattcaccccgtgtgcttgccagacaagcagacagtaaccagtttgctccaggctggttataaagggcgggtgacaggctggggcaaccttcgggagacgtggacaaccaacatcaacgagatacagcccagcgtcctgcaggtggtgaacctgcccattgtagagcgaccagtgtgcaaggcctctacccggatacgcattactgacaacatgttctgtgctggcttcaaggtgaatgacaccaagcgaggagatgcttgtgaaggtgacagtgggggaccttttgtcatgaagagcccctacaaccaccgctggtaccaaatgggtattgtctcctggggtgaaggctgtgaccggaatgggaaatatggcttctacacgcacgtgttccgtctgaaaaggtggatgcagaaagtcattgatcagcatagataggtttgtgggtgggtgagagacccacagtatgggatcctcattgcaaaatcacagaaaccagttcaaaatatttttgtggtttgtttctgttctcaataaaagtgattgtcg

SEQ ID NO: 3520 - DNA, 1610 bp, Rattus norvegicus
  Genbank Accession No. NM_022934
ggccgggcggaactttccagaacgctcggtgggtggtagaggagcagcgtctggccgagctgcgctgtgctacgctcctctttccgctctccggcgccggcccgctcaccggctgtaaaaaatggtgaaagaaactacttactatgatgttctgggggtcaaacccaatgccacccaggaagaattgaaaaaggcatatagaaaattggccttgaagtaccaccctgataaaaatccaaatgaaggagaaaagtttaaacagatttctcaagcttatgaagttcttgctgattccaagaaaagggaactatatgataaagggggcgagcaggcgattaaggagggcggagcaggtggaggttttggctcgcccatggatatctttgatatgttctttggaggaggaggaaggatgcaaagagaaaggagaggtaaaaatgtcgtgcatcagctctcagtgaccttagaagacttatataatggtgcaacaaggaaactggctctgcaaaaaaatgtgatttgtgacaaatgtgaaggccgaggtggtaagaaaggagcagtagagtgctgtcccaactgccgggggactggcatgcagatcaggattcatcagattggaccaggaatggttcagcaaattcagtcagtgtgcatggagtgccagggtcatggagaacgcatcagtcctaaagacagatgtaaaagctgcaatggaagaaagatagttcgagagaagaaaattttagaagttcatattgataaaggcatgaaagatggtcagaagataacattccacggtgaaggagaccaagaaccaggactggagccaggagatattatcattgtgttagatcagaaggaccatgctgtttttacaaggcgaggagaagaccttttcatgtgtatggacatacagctggttgaagcattgtgtggcttccaaaagccaatatctactcttgacaaccgaaccatagtcatcacctctcatccaggtcagattgtcaagcatggggatataaaatgtgtgctaaatgaaggtatgccaatataccgtcggccatatgaaaagggacgtctaatcattgagtttaaggtaaactttcctgaaaatggctttctctctcctgataaactctctttgctggaaaaactccttcctgaaaggaaggaagtagaagagactgatgaaatggatcaggtagaactggtggactttgatccaaatcaggaaagacggcgtcattataatggagaagcgtatgaggatgatgagcatcaccccagaggtggcgttcagtgtcagacctcttaatgggccagtcactctttgaccttgtgtatgcagtagtgaatgtgggaaggactgtaatcataatatgctcactacttggctgttgtttttgttttaatattcaactatagtagtgttttaaaagttaaatgaagaataaacacaaatataaaagctctgactttgccctgtatgtatgatgactttaatgttcaagatgaaaatgaatacttgtaaaaaactagtttaaaaaatgccctagcatctgttaggccatatcttgtgtaactgataatagcgtgtacattagactgac

SEQ ID NO: 3521 - DNA, 2668 bp, Rattus norvegicus
  Genbank Accession No. NM_022935
gagtggccaggagcaaagtctggaagccggcgagccacggagcagagcacacagagctatgaggcttgcacaaatgtgtctggccttcggctgggcagctgtcatattggttctacagacggtagacacggcatctgctgtgaggactccttatgacaaagcgagggtatttgcagacctgagcccccaggagataaaggctgttcacagcttcctgatgaacagggaggagctggggctgcagccgtccaaggaaccgactttggccaaaaactctgtgtttctcattgagatgctactgcccaagaagaagcatgtgttgaaatttctggatgaaggaagaaaaggtcctaaccgggaagctagggctgtcatcttcttcggtgcccaggactaccccaatgtcactgagtttgctgtggggcccctgccacggccctactatattcgagcactatcccccaggccagggcaccatctgtcctggtcatccaggcccatctccacagcagagtacgacctcctctaccacacgctgaagagagccaccatgcctctgcaccagtttttccttgacaccactggcttctcattcctaggctgtgacgaccgatgcttgacttttactgacgtagctccacgtggtgtggcgtctggtcagcgtagaagctggtttattgtgcagcgctatgtggaaggctatttcctgcatcctacagggctggagatcctattggatcatgggagcacagatgtccaggactggagagtggagcagctctggtataacggcaagttctacaacaacccagaggaactggctcggaaatacgcagttggagaagtggacacggtggtcctcgaggacccactgcccaatggcacagagaagcccccactcttttcttcctacaaaccccggggggaattccatacaccagtcaatgttgctggcccccacgttgtccagcccagcggcccccgatataaactagagggcaacactgtgctctatggaggttggagcttctcttatcggctaagatcctcttctgggctgcagatcttcaatgtgctctttggaggtgagcgtgttgcctacgaggtcagtgtgcaggaggctgtggcactgtatggaggacacacacctgcaggcatgcagactaagtacattgatgttggctggggcctgggcagtgtcactcacgagttggcccctggcattgactgtccagagactgctactttcctggatgccttccactattacgacagcgatggccctgtccattatccacatgctctgtgcctctttgagatgcccacaggggtgcccctgaggcgccactttaactcaaactttaaaggtggcttcaacttctatgcgggtttgaagggatatgtgctggtgctacggacgacatcaactgtctataattatgattacatctgggatttcatcttctactctaacggggtgatggaggccaagatgcacgccactggctatgtccatgcgaccttctacactcctgagggactgcgccatggcactcgcttacaaacccacctgcttggtaacatccacacccacctggtgcactaccgtgttgacatggacgtggcaggcaccaagaacagcttccagacactgacgatgaagctggaaaacctcaccaatccctggagcccaagtcactccctggtccagcccacactcgagcagacccagtactcccaggagcaccaggctgcattccgcttcggacagactctgcccaagtacctgctctttagcagcccccaaaagaactgctggggtcacaggcgcagctaccgcctgcagatccattctatggctgagcaggtgctgccaccaggctggcaggaggagcgggctgtcacttgggccaggtatcctttggctgtaacaaagtatcgggaatctgagcgctacagcagcagcctctacaaccagaatgacccctgggatccccccgtggtctttgaggagttccttcggaacaacgagaacattgaagatgaggatttggtggcctgggtgacagtgggcttcctgcacatccctcactcagaagatgtccccaacacagccacacctggaaactctgtgggcttcttgctccggcccttcaacttcttcccagaggacccatccctggcttctagagacactgtgatagtgtggccccaggacaagggcctcaaccgtgtccagcgctggatccctgaggacaggcgctgcttggtgtctcctcctttcagctataatgggacctacaagcctgtgtgatgggtcagccccagcctctgcagcacacccagagcctcacaaagacagggaaaacaaacaaacgaaacttctgtctctaccctgtatgctaccttttagctctactcgtgtttcattaccatacctgccacagacttccaagaccattgcaaaggaaggaccacaattttctgccggtggttcggtggtttggagggtggtgttttttaaatatttgaggtgtttatcttcctatcaggagactttagagaaattgtctcacctcagtgatgggagggagtaaggaaactgtcatatgaaaatctaataaaatgacacctttgctctttagacatcaaaaaaaaaaaaaaaaaa

SEQ ID NO: 3522 - DNA, 819 bp, Rattus norvegicus
  Genbank Accession No. NM_022939
atgtcctacggtcccttagacatgtatcggaatccgggccgtcggagcctccgggacttcagcagcatcatccagacgtgcagcggcaacatccagcggatcagccaagccactgctcagataaagaatttgatgagccaacttggaactaagcaggactcaagcaaactccaggaaaatttgcaacagttccagcactccacaaatcagcttgccaaggagacaaatgagttgctgaaggagttagggtccttgcccctacccttgtctgcatcagagcagcgccaacagaagcttcagaaggagcggctcatgaatgacttctcgtcggccttgaacaatttccaggttgtgcagagaaaggtatctgagaaggagaaagaaagcatcgcgagagcacgggctggatcccgtctttctgcagaagacaggcaaagagaagagcagctcgtctcatttgacagccatgaggagtggaaccagatgcagagccaggaggaagaggcggccatcactgagcaagacctggaacttattaaagagagggaaacggcgattcagcagctggaggctgacattttggatgtcaatcagatctttaaagacttagctatgatgatccacgaccaaggtgatctgattgatagcatagaagccaatgtggaaagctcagaggtgcatgtggaaagagcctctgatcagctacagagagctgcttactatcagaaaaaatctcgcaagaagatgtgtatcctcgtgcttgtcctctcagtgattgttacagtcttggtagttgttatctgggttgcttctaagtga

SEQ ID NO: 3523 - DNA, 4828 bp, Rattus norvegicus
  Genbank Accession No. NM_022944
cgggcggcggatggccatcttaagtggccgcggggagtccagggaggcttccccgggctaggagtcaccagagtcgccccagagttgaggccggcgctgctggcggcggcggctacgcggagatcgaggcggccggcgcggcaagcgtggaccccggatactgggctctctcaggctggtggatcctcaggcccggaacccgggccaggcccagcctccactccaagcttccctgggcggatggcgcggaggcaggcatcggcggcgctgagccctacgcgggccatggcctcagtgtgtggggcaccgagtcccgggggcgcgctaggcagccaggcccctgcctggtatcaccgtgacctgagccgcgcggctgcggaggagctgctagctcgggcaggccgcgatggcagcttcctggtgcgagacagcgagagcgtggcgggggccttcgcactctgcgtcctgtatcaaaagcacgtgcacacctaccgcattctgccagatggagaggatttcctggctgtgcagacctcacagggcgttcctgtgcgccgcttccagaccctgggtgagcttataggcctgtatgcccagcccaaccagggtcttgtctgtgctctgctgctgcctgtagagggggagagagagccagatccaccggatgaccgagatgcctcagatgtggaggacgagaaacccccactacccccgcgctctggctctaccagcatttctgtccctgcggggcctagcagccccctgccagcccctgagactcccacaactccagcagctgagagcactcctaatggactcagcactgtgtcacatgagtatctgaagggcagctacgggctggacctggaggctgtacgaggcggagccagcaacttgccccatctcacccgaacccttgtcacctcatgccgtaggctacacagcgaggtggacaaggtcctgtcaggcctagagatcctgtcgaaggtgtttgaccagcagagctcacccatggtgacccgccttttgcagcagcagagcctaccacagactggagagcaagagttggagagccttgtgctgaagctatctgtgctaaaggacttcctgtcaggcatccagaagaaggccctaaaggcactgcaggacatgagctccacagcacctccggctccattgcagccctccatacgaaaggccaagaccatccctgtgcaagcctttgaggtgaagctggatgtgacactgggtgacctgaccaagatcgggaagtcccagaagttcacactgagcgtggatgtggagggtgggaggctggtactgctgaggagacagcgtgactcccaggaggactggacgaccttcacacacgaccggatccggcagctcattaaatcccagcgtgtgcagaacaagctgggtgttgtgtttgaaaaggagaaagatcggacgcagcgcaaggacttcatctttgtcagtgcccggaagcgagaagccttctgccagcttctgcagctcatgaagaacaagcattccaagcaggatgaacctgacatgatctccgtcttcataggcacctggaacatgggaagtgtaccaccaccaaaaaacgtgacatcttggttcacatcaaagggactggggaaagccctggatgaggtcacagtgactataccccacgatatctatgtctttgggactcaggagaactcagtgggtgacagagagtggctggatctgctgcgtgggggcctcaaggagcttacagatctggattaccgtccgattgctatgcagtcactgtggaacatcaaggtggccgtgctggtcaagccagaacatgagaaccgcatcagccacgttagtacgtccagtgtgaagactggtatcgccaataccctggggaacaagggagctgtgggtgtttccttcatgttcaatggcacttcttttggcttcgtgaattgccatctcacctcagggaatgagaagactactcggcggaaccagaattatctggacatcctgcgtcttctctcattgggtgatcggcagctcagtgcctttgacatctctttgaggttcactcatctcttctggtttggggaccttaactaccgcttagacatggatatccaggagatcctgaactacattagtaggagagagtttgagcccctgctcagggtggaccagctcaacctggagcgggagaagcataaggtcttccttcgatttagtgaggaggagatatctttcccacccacctaccgctacgagcggggttcccgagacacatatgcttggcacaagcagaagccaactggggtccggaccaatgtgccttcatggtgtgaccggattctatggaaatcctatcctgaaacccacatcatctgcaattcctatggttgcactgatgacattgttaccagtgaccattctcctgtgtttgggacatttgaggttggagtgacttcccagttcatctccaagaaaggtctctctaagacctcagaccaggcctacattgagtttgagagcatcgaggccatcgtgaagacggccagccgcaccaagttcttcattgagttctattctacctgcttggaagagtacaagaagagcttcgagaatgacgctcagagcagtgacaacatcaatttcctcaaggtgcagtggtcctcgcgccagctgcccacgctcaagccaattctggctgacattgagtacctgcaggatcagcatctcctgctcacagtcaagtccatggatggctacgaatcatatggggagtgtgtggttgcactcaaatccatgattggcagcacggcccagcagttcctgaccttcttgtcccaccgtggagaggagacaggcaacattcgtggctccatgaaggtgcgggtgcccacagaacgcctgggcacccgtgagcggctctatgaatggattagcattgataaggatgacacaggagccaaaagcaaggctccttcagtgttgcggggcagccaggagcacagatctgggagccgcaagccaacttccacagaggcctcctgtccactgtccaagttgtttgaagagcctgaaaagccaccaccgactggcaggcccccagccccaccacgggcagttcctagggaggagtccttgaaccccaggttgaagtcagaggggacacctgaacaggaaggagtagcagcccctccacccaagaacagcttcaataaccctgcctactacgtccttgaaggggtcccacatcagctgctgcccctggagccaacctcatttgccagggcccctatcccacctaccaccaagaacaaagtggccatcacagtgcctgctcctcagcttgggcgccaccggacccctcgtgtgggggagggaagctcttcggatgaggactctgggggcacactgcctcctccagacttcccacctccaccactgccagactcagccatcttcctgccccctaacctggatcctttatcaatgccagtggtcaggggccgaagtgtgggtgaggcccgtggcccaccacctcccaaggcccatccaagaccaccactaccgccgggcacctcacctgccagtacttttttggaagaggttgcaagtgcggatgaccggtcttgctcagtactgcagatggccaagacactcagtgaggtagattattctcctgggcctggacgctcagcactcctccccaaccccttggaattgcagcttccccgagggccctcggactacggacggcccctcagcttccctccaccccgcatccgggagagcatccaagaagacttggcagaggaggctccgtgcccgcagggcgggcgggccagcgggctgggagaggcgggcatgggtgcctggctgcgggccatcggcttggagcgctatgaggagggcctggtgcacaatggctgggacgacctggagtttctcagtgacatcactgaggaagacctcgaggaagctggggtgcaggatcctgctcacaagcgccttcttctggacacgctgcagctcagcaagtgatagcagagatgccgccgagctgccaaagcagagctggaagggcacatgaaaccaggggtgaaagttttgaggggtgtggcagtgcatctctgtctatttattggggaccagagttccctactgcccaattgtttggggcgttctagttagaacatcgtgctccccacctagcttttaggcccagggtcaggggtttagtagcctgtggtaattgtgaagcacggtggttactccagtgcagacacctccctgcctcggttgtgcgtggggtatggttgggcacatctgggtcctcacttccactgatgtttccacctccctccctcgggcctgaactccaggggaagagttcctcgtagctcctactctgggaacgtacgtccgtccgtccggaaatgaaggaagagcccaggaccgggctggatttatttaagtttttctgtgtgggttttgggaagggagggcacgttaattttattggggtggggcaggacctcggccttaaaatgccagtttgcctagttctggctgttcctctggttcgaagaagcgctcttgcccagggaatgcgtggcagccggcggatgggggggggggggcagcctcgggttgccccggcaccagaagacagtgcttttgcagtttatcccatcttgggcactcagaaaggttgccggcttgatgtcttcaataaattaagttttatttggattgagcaaaatcaccttaataaattacacgtttttcaaagaaaaaaaaaaaaaaaaaa

SEQ ID NO: 3524 - DNA, 715 bp, Rattus norvegicus
  Genbank Accession No. NM_022949
tctcgctgagcccgccaacatggtgttcaggcgtttcgtggaggttggccgagtggcctacatctcctttgggccccatgctggaaagctggtcgcaatcgtagatgttattgatcaaaacagggctttagtggatggaccctgcacccgggtgaggagacaggccatgcctttcaaatgcatgcagctcactgacttcatcctcaagttcccacacagtgcgcgccagaagtatgtacggaaagcttgggagaaggcagacatcaatacaaagtgggccgccacacgatgggccaagaaaattgatgccagagaaaggaaagccaagatgacagattttgatcggttcaaagtcatgaaggcaaagaaaatgaggaacagaataatcaagactgaagtgaagaaactccagagagctgctctcctgaaagcttctcctaaaaaagctgctgttgctaaggctgccattgcggccgctgcagcagctaaagccaaggtcccagccaagaaggcaacaggaccaggccagaaggccgcagcgcagaaggcctctgcacagaaggctgcaggccagaaggcagcgccccctgctaaaggtcagaagggtcagaagaccccggcccagaaggcacctgctccaaaggcagctggcaagaaagcatgaggaggctacacaaagaataaaggttctttttgactgaaaaaaaaaaaaaaa

SEQ ID NO: 3525 - DNA, 4131 bp, Rattus norvegicus
  Genbank Accession No. NM_022951
ctcggagaaagacaggccggccatcaggaaaacaaacaagcctcagcaacatctaaacccttgaaaggatcctgagagaggggggaaagggaaaacagcagccaccagcccaaccacttgtgtcttctgcccctccccacctatcttgcccaccccaccagcccacgctgcttgggacttgaaatctgtggccgaaggaccgtcaccacataacttcaaaaataatcaaccaccctccctacccaaacccacccaatctcactcatccagcatttcctttttggagtccactcagaatttttttcaacgaccccctctccctaatggagttgggtggggggaaaatgaaaactgagttggtctttacttttttaagagactttttgatccaatgaggccccacaagtaactgagtttgggtcctggttggttgttttattttttttcctccaaaattttacccctcccccctgagcccgaggtgctgacgtcgcaaaaaaattggataaagccaccatcatgggttcaggacccatagaccccaaagaacttctcaagggcctagatagcttccttactcgggatggagaagtgaagagtgtggatggaattgccaagatcttcagtctaatgaaggaggcacgaaagatggtgagtcgatgcacgtacttgaatattatcctgcagacccgggcgccggaggtgctagtcaagtttattgacgtcggcggctacaagcttctgaacagttggttaacgtattcaaagacgaccaacaacattcctctcctacagcagattctgctgactctgcagcacctcccactgactgtggaccacctcaagcagaacaacacagcgaagctagtgaagcagctcagcaagtcaagcgaggacgaagagctccggaaattggcatcagtccttgtcagtgactggatggctgtcatccgctcccagagtagcacccagcctgcagagaaagataagaagaaaaggaaggaagaggggaaaagtcgaaccacgcttcctgagcggcctttgactgaagtgaaggctgaaacccgggctgaggaagccccagagaagaagaaggagaagcccaagtcacttagaactacggcacccagtcatgccaagttccgttctactggactggagctggacaccccatctttggtgcctgtgaagaagaactccagcactgtggttgtgtcagacaagtacaacctgaagcccatccccctcaagcggcagagtgccacagctgctccaggcgatgctgccccgcctgcagagaagaagtacaagcccctcaacacaacccccaataccaccaaagaaattaaagtgaagatcatccccccacagcccatggagggcctcggttttctggatgctctcaattccgcccctgtcccaggcatcaaaattaagaagaagaagaaggttctatcacctactgctgccaagcccagcccttttgaagggaaaacaagcactgagccaagcacagccaaaccttcctccccagagcctgcagcccccgctgagcccatggacacagaccgtcctggcacccctgtccccgctgtggaagtcccggagctcatggatgcagcctcttcggagccaggagctctggatgcaaagcctgtggaaagccctggagatcccaaccagctgactcgaaagggcagaaagagaaaaactgtgacgtggcctgaggagggcaagctgagggagtatttctacttcgaactggatgaaactgagcgagtgaatgtgaacaagatcaaggactttggggaggctgctaagcgtgagatactgtcggaccgacatgcttttgagacagcccggcgactaagccatgacaatatggaggagaaagtgccctgggtatgtcccaggcctctggttctgccctcacctcttgtcatccctggaagcaacagccaggagcgatacatccaggctgagcgggagaagggcatccttcaggagctcttcctgaacaaggagagtcctcacgagcctgatcctgagccgtatgaacccattcctcccaaactcatccccttggatgaggagtgcgccatggatgagactccgtatgttgagaccctggagcctggagggtctggtggctcacctgatggagcaggaggctccaagctgcctccagttctggccaatcttatggggagcatgggagcagggaagagcccccagggccctggaggcggtggcatcaatgttcaggagatcctcacttccataatgggcagtccaaacaaccacccttcagaggagctgctgaaacagccagactactcagacaagctgaagcagatgctggtgccacatgggctcctaggtcctggtcctgtagccaatggcttcccaccaggaggccctgggggccccaagggtatgcagcatttcccccctggtcctggagggcccatgccaggtccccatggaggccctggtggaccagtgggtccacgtctcctgggtcccccaccaccttctcggggaggtgatccattctgggatggcccaggtgaccccatgcgaggtggcccaatgcgtgggggtccaggacctggtcctggaccataccacagaggccgagggggtcgtggaggaaatgaaccgccaccaccccctccattccgaggagccagaggaggtcgttctggaggaggccccccaaatggccgagggggtcctggtggaggtggcatggttggaggtggtgggcaccgcccccatgaaggccctggagggagcatgggcagtggacatcggtctcatgagggccctggagggagcatgggcagtggacatcggtctcatgaaggccctggacacgggggaccccatggccaccggccacatgacgtccctagccatcgaggccacgaccatcgagggccaccacctcatgaacaccgcggtcatgatggccatgggggaggcggccaccgagggcatgatggaggccacagtcacggaggagacatgtcaaaccgccctgtctgccgacacttcatgatgaagggcaactgccgctatgagaacaactgtgccttctaccacccaggggtcaacgggcccccactgccctaggcctgcctgccctacccgcacccctgtggactgcagctttgctccttccacttggttatggcttctgtgaggcccactttccttttccccagctgatgaggagccggccccctcagttcccacctggttgggtttctgggggtttctgattcctggtgtgcattgatgtacatattccctccagtctggagcggagaggagagagactggactgctgagacggctggcttcactttgtgaggagatttgccctgtgccccaaaccccttccagtattagccccgatgcctgagaacctgaagccggccaccctggagacctctgctctccacatgcacacggaactgagttggtcagctgcacttaggaaaccgtccaagctaagctcattatcttcacagggtgagggggtggtgaggggtaccatatatcccactgcactgagggctcaagctggctgaagctgagttctggaactaccccccacttgtgccccacatgggccagtcactgttgagtcctttctcaagaaggactgcaactgttacttcccaggtcatcgtgggtctgctaggttcagtgatggcacattcatatctgtgtccagtggaagttgtatctggcagaggggtggcctgtagtgttgggccactcttgcctacagccattttcgagactccgtgaggccagctttcattaactttagccgggtataccgggcctgacgcactacatgcactgcctttgggagtgggctggctccttaccccgtaaggagccctgtcagtgaggcttcctgggtagactcagcaggaggggcccttcccagtcctctcctccccctgtcttggcatcagttgttttctatgaaaacagtgggttggttttgtgcagggtcttgggttagaaccaatggatttgaggagttttttcttttggttttgtatattttgtacattaataataaacagtggaaagagaagcagctcattt

SEQ ID NO: 3526 - DNA, 797 bp, Rattus norvegicus
  Genbank Accession No. NM_022952
  misc_feature (1)..(797): n = a or c or g or t
agccctgggccccacaactgcaagcagagccggagccgcccagttacagcgggacccgggcctctggggtccanacaggggtcgccatgatccgattcattctcatccagaaccgggcaggcaagacacgcctggccaagtggtatatgcagttcgatgatgacgagaagcagaagttgatcgaggaagtgcacgccgtggtcaccgtcagggatgccaagcacaccaactttgtggagttccggaacttcaagatcatctaccggcgctacgctggcctctacttctgcatctgcgttgacgtcaacgacaacaatctggcctatcttgaaggcatccacaacttcgtagaagtgttaaatgaatacttccacaatgtctgtgaactggacctggtgttcaacttctacaggttttacacggtggtagatgagattttcttggcaggagagatccgagagaggagccagacgaaggtgctgaagcagctgctgatgctgcagtcgctggagtgagggggggcttccgccccagcccggcntgntgggccaacatgcntgtttgtcccctgccaggtttgaggcccaccccagcagccccttccnttctttagntggcccagaggagtgacccagcagggtttaggccacaggggaggaggccagaacccactgcctttgggccctaagtggatggcagaggccaccgtgatgtcccgagtaactgtgccattattgtgtgatgctgtgagtgtgcgtgtgtgcagcccccaataaacctgtggtcctgcctgnaaa

SEQ ID NO: 3527 - DNA, 2752 bp, Rattus norvegicus
  Genbank Accession No. NM_022958
cttgtcatgggggaggcggagaagttccactacatctacagctgtgacctggacatcaacgtgcagctgaagatagggagcttggaagggaagagagaacaaaagagctacaaagctgtcctagaagatcccatgctaaagttttccggactataccaagagacatgctctgatctgtatgtgacttgtcaagtttttgctgaagggaagcccttggccttgccagtcagaacatcctacaaaccatttagtacacgatggaattggaacgagtggctgaaactcccggtgaaataccctgacctgcccaggaacgcccaagtggccttgactatatgggatgtgtatggacccggaagggctgtgccggtgggaggaacaaccgtgtcactctttggaaaatatggcatgtttcgccaaggaatgcacgacttgaaagtctggcctaacgtggaggcagatggctccgaacccacacgaaccccgggcagaacaagcagcacactctcagaagaccagatgagccgccttgccaagcttaccaaggctcatcggcagggacacatggtgaaggtggattggttggacagactaacgtttagagagatagaaatgataaatgagagtgagaaacgaagctctaatttcatgtacttgatggttgagtttcgctgtgtcaaatgcgatgacaaggaatatggtattgtctactatgaaaaggatggtgacgaatcatctccaattttaacaagctttgagttagtgaaagttcctgatcctcaaatgtctatggagaacttagtggagagcaaacaccacaagcttgctcggagtttaagaagtggaccatctgaccacgatctcaaacccaacgctaccacaagagatcagctaaatattattgtgagctacccaccaaccaagcagctcacatatgaagaacaagatcttgtttggaaatttagatattatcttactaatcaagaaaaggctctgacaaagttcttgaagtgtgttaactgggacctaccccaggaggccaagcaggcgctggaacttctgggaaagtggaagccaatggatgtggaggattccctagagctgctctcctctcattacaccaaccccaccgtgcggcggtacgctgtggcccgcttgaggcaggccgatgacgaggatttgctgatgtacttgctgcagctggtccaggctctgaaatatgaaaactttgatgacataaagaacggtttggagcctaccaagaaggatagtcaagcttccgtgtcagagagcctgtcaagttctggagtcagttctgcagatatagatagctctcaaattataaccaaccctcttcctccggtggcctcccctcctcctgcatctaaatcaaaggaagtttctgatggggaaaacctagagcaggatctttgtaccttcttgatatcaagagcctgtaagaactcaacactggctaactatttatactggtatgtgatagtggagtgcgaagatcaggacacacagcagagggacccaaagactcacgagatgtacctgaacgtcatgaggcgcttcagccaagccctgctcaagggtgacaagtccgtgcgggtcatgcgctccctgctggcggcacagcagacctttgtagatcgcctggtgcatctgatgaaggcagtgcagagagaaagtgggaaccgcaagaagaagaatgagagacttcaagccttgcttggagataatgaaaaaatgaacttatcagatgtggagctgatcccattgccgttagagccacaggtgaaaatacggggaatcatcccggaaacagccacactgttcaagagtgctcttatgcctgcccagctgttcttcaagacagaagacggtggcaaataccctgtgatcttcaagcatggggacgacttgcgtcaagatcagcttatccttcagatcatctccctcatggacaagctgttgcggaaagaaaatctggatttgaaattgaccccttacaaggtgttagccacgagtacaaaacatggcttcatgcagttcatccagtcagttcccgtcgccgaagttcttgacacggagggaagcattcagaactttttcaggaaatatgccccaagcgagactggacccaatggcatcagtgcagaggtcatggacacttacgttaagagctgtgctggctactgtgtgatcacctacatccttggggttggagaccggcacctggataaccttctgttaacaaagacaggcaaactcttccatatagatttcgggtatattctgggccgagatcccaagcctcttcctcctccaatgaagctgaataaggagatggtcgaagggatgggtggtacccagagtgagcagtaccaagagttcagaaagcagtgttacacggccttcctccacctgcgaaggtattcaaatctgattctgaacttgttctccttgatggttgatgcaaacattccagatattgctcttgaaccagataaaactgtaaaaaaggttcaggataagttccgtctggacctgtcagatgaggaggccgtgcattacatgcagagtctgatcgacgaaagtgttcacgccctgttcgctgcggtggtggagcagatccataagtttgcccagtactggagaaaatgaaagtggatttgacccatcgtgatgcctgacttagtaagaaaacacatgagaaaccactgctgtgtactgaggacattagaga

SEQ ID NO: 3528 - DNA, 1495 bp, Rattus norvegicus
  Genbank Accession No. NM_022960
gtgagcagggagggaggggccgacagcagaggcagacaaagattaagtcacagctccaattgggacaggccctcacacagtcaagtatctctctagtcacctccagagatccgtgtggggctaatcaggtttttgtttgtttgtttgtttttggtttggttttggttttaatgtggtagtgaaagcagggaaccgagcaagcagaccttggtggaaagtgtacctctggcagaaaccccaagatgccttctgagaaggacggtgccaagaagagcctcatgcagaggctggccctgaagagccggatagcgaaggagacactctccgagttcctgggcacctttataatgattgtccttggatgtagctctattgcccaagcggtcctcagtcgagaacgttttggcgggatcatcactatcaatattggatttgcatcggcagtcgtgatggctctctatgtgacatttggtatctctgggggccacatcaacccagctgtgtcttttgcaatgtgcgcctttggaaggatggagtggttcaagttcccattttatgtgggagcccagtttttgggagcctttgttggggctgcaacggtctttggcatttattatgatggactcatggcctttgctggcggaaaactgctcgtcgtaggagaaaatgcaacagcattcatttttgcaacatatccagctccattcatatccacgccaggtgcctttgtagaccaagtggtgtctaccatgttcctccttctgatcgtctttgccatgtttgactccagaaacctgggtgtccccagaggcctggagcctgttgtcattggcctcctgatcattgtcctttcctgttctctcggactcaactctggctgtgccatgaacccagctcgagacctcagtcccaggctcttcactgcactggcaggatgggggtttgaggtcttcacagttggaaataacttctggtggatacctgtcgtgggtcctatgattggtgctttcctgggaggtcttatctacattctttttatccaaatgcatcactcgaagctcgacccagacatgaaggcagagccatctgagaacaacctagagaaacacgagctcagtgtcatcatgtagtgggatggccagatctgcagttaccgttcatccagttctttcttcagagaagatgtcacctgtgtgcctatgcagacttggggcgggggaatctacctgtctgctagttttctctagccaactgggacaaaaaaattacaaaggcatccgtggaaaactccaccagtcacccctccccagaatagcactgactgtttatgatgggtatttgatggaagtccttactcctaggtgattgctaagaattttgaaacttgaccatgtgcttggctggatagcctcagagacctttttttaccctgtatgaaattgtgtcatcaaaggctctgttttcacaatctataaatacaacattctaaaactgg

SEQ ID NO: 3529 - DNA, 5579 bp, Rattus norvegicus
  Genbank Accession No. NM_022962
ttttaaattttggttggtggcggcagtgctgggccggaggaaagaagggacacggagtcctccctcgctcagccaccccctccccgcttccccctgggccgggctccgggagatgtgccgggcggggggcccggcttcgcggagccgcgggaggagcgcgcacggccgaccccgaagcgccgctggacaggctggtgggccaggccttggtaccctggtgatgcggggcaaggccccccccacagtccgctgagatcaccgtgcccgcccctggccttcgccatggcccgcttggctgcagcactctggagtctctgtgtgacgactgtcctcgtcacctctgctacccaaggcctgagccgggctggactcccatttggattgatgcgccgggagctagcatgcgaaggctaccccattgagctgcggtgcccgggcagtgacgtcatcatggtggagaatgcaaactatgggcgcacagatgacaagatctgcgatgccgacccttttcagatggagaacgtgcagtgctacctgcctgacgccttcaaaatcatgtcacagagatgtaataaccgaacccagtgtgtggtggtggccggctctgacgcctttcctgacccctgtcctggaacctacaagtacctggaggtgcagtacgactgtgtcccttacaaagtggagcagaaagtcttcgtgtgcccagggacactgcagaaggtgctggagcccacctccacacatgaatcggagcaccagtctggcgcatggtgcaaggacccactgcaggcaggtgaccgtatctacgttatgccctggatcccctaccgcacggacacactgaccgagtatgcttcctgggaggactatgtggctgcacgccacaccaccacgtacagactgcccaaccgtgtagatggcactggctttgtggtatatgatggtgccgtcttctataacaaggaacgtactcgcaacattgtcaaatatgacctgcggacccgcatcaagagcggagaaacagtcataaacacagccaactaccacgacacctcaccttatcgctggggaggcaaaaccgacattgacctggcagtggatgagaacgggctgtgggtcatctatgccaccgaggggaacaacgggcgtctggtggtgagccagctcaacccctacacactgcgtttcgagggcacctgggaaacaggctatgacaagcgctcagcctccaatgccttcatggtgtgtggtgtcctctatgtgctgcgctctgtttatgtggatgacgacagtgaggcagcaggcaaccgcgtggactatgcctttaacaccaatgcaaaccgagaggagcccgtcagtctcgccttccccaacccctaccagtttgtatcttctgttgactacaatccccgggacaaccagctgtatgtgtggaacaactatttcgtggtgcgctacagcctggagtttggacccccagatcccagtgctggcccagccacttccccacctctcagtaccaccaccacagctcggcctacgcccctcaccagcacagcctcacctgcagccaccactccactccgccgggcgcccctcaccacgcacccagtaggtgccatcaaccagctgggacctgacctgcctccagccacagccccagcacccagtacccggcggcctccagcccccaatctgcatgtgtcccctgagctcttctgtgaaccccgagaggtccggcgggtccagtggccagctacccagcagggtatgctggtagagagaccttgccccaagggaactcgaggaattgcctcgttccagtgcctcccagctctggggctctggaatcctcggggccctgacctcagcaactgcacttccccctgggtcaaccaagtcgcccagaagatcaagagtggagagaatgcagccaacattgctagtgagctggcccgccacacgcggggctccatctatgctggggacgtgtcctcatcggtgaagctgatggagcaactgctagatatcctggatgcccagctccaggccctacggcccattgaacgagagtcagctggcaagaactacaataagatgcacaagcgagagagaacctgcaaggactatatcaaggctgtggtggagacagtggacaacctgcttcggccagaggcacttgagtcatggaaagacatgaatgccaccgaacaggtccatacggccaccatgctcctagatgtcttagaggagggtgccttcctgctggccgacaatgtcagagaacctgctcgcttcttggctgccaagcagaatgtggtcctggaggtcactgtcctgagcacagagggtcaagtgcaggagttggtgttcccccaggagtatgccagtgagagctccattcagctgtccgccaacaccatcaagcagaacagccgcaatggtgtggtgaaggttgtcttcattctctacaacaacctgggcctcttcttgtccacggagaatgccacagtgaagctggcaggtgaggcagggaccggtggccctggaggtgcctccctggtggttaactcacaggtcatcgcagcatccatcaataaggagtccagccgtgtcttcctcatggaccctgtcatctttactgtggcccacttggaggccaagaaccacttcaatgcaaactgctccttctggaactactcagagcgctccatgctgggctactggtcaacccagggctgccgactggtggagtccaataagacccataccacatgtgcctgcagccacctcaccaacttcgcagtgctcatggctcaccgagagatctaccaaggccgtattaatgagctgttgctgtcagtcatcacctgggttggcattgtcatctccctggtctgtctggctatctgcatctccaccttctgcttcctgcggggcctgcagaccgaccgcaacaccatccacaagaacctgtgcatcaacctcttccttgcagagctgctcttcctggttggaatagacaaaactcagtatgaggtcgcctgccctatctttgcgggcctgctgcactacttcttcctggccgccttctcctggctgtgcctagagggcgtgcacctctacctcctgctggtcgaggtgttcgagagcgaatattcacgcaccaagtactattacctgggcggctactgcttcccagccctggtggtaggcatcgcagccgccattgactaccgaagctacggcactgagaaggcctgctggctgagggtggataactatttcatctggagcttcattgggcccgtctcctttgttattgtggtgaacctggtgttcctcatggtgaccctgcacaagatgatccgaagctcatccgtgctcaagcctgactccagccgccttgacaacatcaagtcctgggcgctgggtgccattgcactgctcttcctgctgggcctcacctgggctttcggcctcctcttcatcaacaaggagtcagtagtaatggcttacctcttcacaaccttcaacgccttccagggggtcttcatctttgtctttcactgcgccttacagaaaaaggtgcacaaggagtacagcaagtgcctgcgtcactcctactgctgcattcgctccccacctgggggggctcacggctcccttaagacctcagccatgcgaagtaacacccgctactacacagggacccagagccgaatccggaggatgtggaatgacaccgtgaggaagcagacagagtcgtcctttatggcaggggacatcaacagcacccccaccctgaaccgaggtaccatggggaaccacctactgaccaaccctgtgctacagccccgtgggggcactagcccatacaatacactcattgcagagtctgtgggcttcaatccctcctcgcccccagtcttcaactccccaggaagctacagggaacctaagcaccccttgggcggccgggaagcctgtggcatggacacactgccccttaatggcaacttcaacaacagctactccttgcgaagtggtgatttccctccgggggatgggggtcctgagccaccccgaggccgaaacctagcggatgctgcggcctttgagaagatgatcatctcagagctggtgcacaacaaccttcggggggccagtgggggcgccaaaggtcctccaccagagcctcctgtgccacccgtgccaggagtcagtgaggacgaggctggtgggcctgggggtgctgaccgggctgagattgaacttctctacaaggccctggaggagccactgctgctgccccgggcccagtcggtgctgtaccagagtgatctggatgagtcggagagctgtacggcagaggatggggccaccagccggcccctctcctcccctcccggccgggactccctctatgccagcggggccaacctgcgggactcgccctcctacccggacagcagccccgaagggcctaatgaggccctgccccctcccccacctgctccccctgggcccccagaaatctactacacctctcgcccgccggccctggtggctcggaatcccctacagggctactaccaggtgcggcggcccagccatgagggctacctggcagcccccagccttgaggggccagggcccgatggggatgggcaaatgcagttggtcactagtctctgaggggcctcatggaccagaggcctggccagggagggaatccaggaggggctctggtgggagcagagactgatggaggcagtggctggtgggccactctctccaggtgcccctctgcctgtgggccccacagtccccttggggactatgacctgggccccaggtgccagggttagtagacagggtttccaccagccacaagccccagcctctttaggggagtgcattgaggagaagcccccagggccctaggagtgagggagaagctggtaggtgtgaccaacgtccaaagctccctccctttggagggagaaagcaagggataaggcttccctaggtgtacaggggtggccacttttgaggtggccgaagccttgcaggatacaccctatctgctgctcactcttcttcgtccaccagaaaggagcagtgggacagatggacagggtccttccatgctacagttccttgcttcttggagactgggccttacatcctgagagagcccaggcccaggggatggatggggttgtgagggctggtggttaatggtggaactttctctgaagctcctttctcccttgctattggtccctatctcccgagcaagcctaccctaaacccccagagtgcacccaatgaccccctcccttggggtgactcctgatgaagcacaactccccgcagggccccaacccactgcagtggccatatttgggcagttcccagtcctgtgggctgggctatctggggagcagatgtggggtctggggctccctgaggagtgggtcctgggtttggatctttccctagggggtcctcttacccttctcttcctcccctattgctgtaaatatttcaacaaaatggaaaaaaaaaaaaaa

SEQ ID NO: 3530 - DNA, 3810 bp, Rattus norvegicus
  Genbank Accession No. NM_023092
gatagactcgagcggaatcgacgccggaggtcccaaggcccactcccacccagcctggccaggccggctacagtgggatccaggggtcgagactccgatccccctaagccaaagggcctgcaaggggcagtgcgggggggggggctagcccctccctcggtgaccgtgcgccggagcactgattaacgcgggcacggagcagggcaccaggtcgcaggatgcgctaccgggcgtcggccctgggcagtgacggggtacgagtgaccatggagagcgccttgactgcccgagaccgggtgggggtgcaagactttgttctgctggagaacttcaccagtgaggctgccttcattgagaacctccggcgtcgattccgggagaacctcatttatacctacattggccctgtcctggtctctgtcaacccctaccgggacctacagatctacacacggcaacatatggaacgctaccgtggcgtcagtttctatgaagtgccgcctcatctgtttgcagtggctgacactgtataccgggcgcttcgtactgagcgtcgggaccaagcagtgatgatttctggagagagtggggcagggaagacagaggccaccaagagattgctccagttctatgcagagacctgcccagcccctgaaaggggtggcgcagtgcgagaccgcctgttgcagagcaaccctgtgctggaggcctttgggaatgccaagactctccgcaacgacaactccagccgctttgggaagtacatggatgtgcagtttgacttcaagggtgcccctgtgggaggccacattctcagttacctcctggagaagtctcgagtggtacaccagaatcacggagaacggaacttccacgtcttttaccagctcctggaggggggggaggaggaggctcttcgtcgtctgggcttggaacggaacccccagagctacttgtacctggtgaagggccagtgtgccaaggtctcctccatcaatgacaagagtgactggaaggttgtgaggaaggcgctgtcagtcattgacttcactgaggatgaagtggaggacttgctaagcatcgtggccagcgtcctacatctgggcaatatccactttgctgctgatgaggacagcaatgcccaggttactactgagaaccagctcaaatatctgaccaggctccttggtgtggaaggcacaacactgagggaagccctgacccacaggaagatcatcgccaagggggaagagctcctgagcccactgaaccttgaacaggctgcatatgcaagggatgctcttgccaaggctgtgtacagccgcactttcacctggttggtcagaaagatcaataggtctctggcctctaaggacgctgagagccccagctggcgaagcaccacagttcttgggctcctggacatttatggcttcgaagtgtttcagcataacagcttcgagcagttctgcatcaactattgcaatgagaagctgcagcagctcttcattgagctgactctcaagtccgagcaggaggaatacgaggcagagggcatcgcgtgggaacctgtccaatacttcaacaacaagatcatctgtgacctggtggaggagaaattcaagggcatcatctccatcttggatgaagagtgcctgcgtcctggggaggccacagacctgaccttcctggagaagctggaggacacaatcaagcaccaccctcacttcctgacgcacaagcttgctgaccagaagaccaggaaatccctcgaccgaggggagttccgccttcttcattatgcgggagaggtgacctacagcgtgactgggtttctggataaaaacaatgacctcctcttccggaacctgaaggagaccatgtgcagctccacgaaccccatcatggcccagtgctttgacaagagtgagctcagtgacaagaagcggccagagacggtggccacccagttcaagatgagcctcttgcagctagtggagatcctgaggtctaaggaacctgcttatatccggtgcatcaagccaaatgacgccaaacagccgggtcgctttgatgaggtgctcatccgacaccaagtgaagtacctgggacttatggagaatctgcgtgtgcgcagagctggctttgcctaccgtcgaaaatatgaggctttcctgcagaggtacaagtcactgtgcccagagacatggcccgtgtggacaggacggccccaggatggggtggctgtgttggtcagacaccttggctataagccagaagagtacaaaatgggcaggactaagatcttcatccgattccccaagaccttgtttgccacagaggactccctggaagtccgacggcagagtctagccaccaagatccaggcggcgtggaggggctttcattggcggcagaaatttctccgggtgaagcgatcagccatctgtatccagtcctggtggcgcggtacactgggccggaggaaggcagccaaaaggaagtgggcagcccagactatccgtagactcatccgtggcttcattttgcgtcatgcaccccggtgccctgagaatgccttcttcctggaccacgtgcgcacgtcatttttgcttaacctgaggcgacaactaccccggaatgttctggacacctcctggcccacacccccacctgccctgagagaggcctcggagctgctccgggagctatgcatgaagaacatggtgtggaaatactgccggagtatcagccctgagtggaagcagcagctgcagcaaaaggcggtggctagtgaaattttcaagggcaagaaggacaattacccccagagtgtccccagacttttcatcagcacacggcttggcacagaggagatcagccccagagtgcttcaggccttgggctctgaacccatccagtatgcagtgcctgtggtaaaatacgaccgtaagggctacaagcctcgttcccggcagctgctgctcacacccagtgctgtggtcatcgtggaggatgccaaagtcaagcagagaattgattatgccaacctaactggaatctccgtcagtagcctgagtgatagcctgtttgtgcttcacgtgcagcgtgaagacagcaagcagaagggagatgtggtactgcagagcgatcatgtgatcgagacactaaccaagacggccctcagtgctgaccgtgtgaataatatcaacatcaaccagggcagcatcacgtttgcagggggtccaggcagggatggcatcatcgacttcacatctggctcagagcttctcatcaccaaggctaagaatggccacctggctgtggtggccccacggctgaattctcggtgatgaaggtgccggtggacccctcctgactcctgatgctttgcttagtcccctcctcccctcccagttaccaaagactcaagcttccagacagggatccagggacaccctcaaagcccacctgcagactcctgccccctgctcatcctctcttgaggtgatcaggaaccagggagcttccccaggagtgggccaggccgggccaagcaatagaaaagcagaggtctgagcaggccaggccagccctctgctgatgccaaatatctaagagaagggaattttaactgaggttttctctgagactttttgatgctttataggaaactatttttttaaaaaagtcattttcctatcctaaacacactggatgtgttttccctgactcaaacaggacaaggaatgtagctgaaagactgactgggctggctgaggccccccctctctgccaagcctctcctca

SEQ ID NO: 3531 - DNA, 4620 bp, Rattus norvegicus
  Genbank Accession No. NM_023103
taagctctgtcctcctgtcctcctgtcatcctgtcctcctgtccttccatcatgaagaagaatagagaggctcagctgtgccttttttcagctcttcttgccttcctgccctttgcttccttgctcaatggaaactcgaagtatatggtgctggtcccttcccagctctacaccgagacccctgagaaaatctgcctgcatctataccatctgaatgagacagtgactgtgacagcttccttgatatctcaaaggggaacgagaaaactgttcgatgagcttgtggttgacaaggacttgttccactgtctttccttcactatccctagattgccctcttctgaagaggaggagtcactcgacatcaacattgaaggggcaaagcataaattcagcgaaaggcgtgtggtgcttgtgaagaacaaagaaagtgttgtctttgtccagactgataagcccgtgtacaagccaggacagtcagttaaatttcgggttgtctctatggataaaaatctacaccccctgaatgagttgtttcctctggcttacattgaggatccgaaaatgaaccgaattatgcagtggcaggacattaagacagagaatgggcttaagcaattgtccttcagcctgtcagcagagcccattcagggcccctacaagatagtgattctcaaacagtcaggagtgaaggaagagcattccttcaccgtcatggaattcgtgcttcccagatttggtgtcgatgtgaaggtcccaaacgccatctctgtgtacgatgaaataatcaatgtgactgcctgtgcgatatatacctatgggaagcctgttccaggacatgtaaagataagtctttgccatggaaatccttcctttagctctgagacaaagtctgcatgcaaagaagaggactccgagctagacaacaacggctgcagcacacaagaagtgaacatcactgagttccaattaaaggaaaattacctcaaaatgcaccaggctttccatgtgaatgcaactgttacagaagaagggacagggtcagagttcagtggatctggaagaattgaagtcgaaagaaccagaaacaaattcctatttctgaaagcagactcacacttcagacacgggatcccattctttgtgaaaatccgcctagtggatatcaagggagatcctatcccaaatgagcaggtcttcatcaaagcacaagaagctggctacaccaatgctactaccactgatcagcatggcttggcaaagttctccatagataccagcagcatctcaggctattccctcaatatcaaagtctaccacaaggaggaaagttcatgtatccattcctcttgcacagcagaaagacacgcagaggaacatcatacggcctatgctgtttactccctcagcaagagctacatctaccttgacacagaagctggcgtcttgccctgcaaccagatccacacagttcaggcgcattttattctgaaggggcaggtcttgggagtgctgccacagattgttttccactacctggtcatggcccagggcagcatcctccagactggaaaccacactcatcaagtggagccaggagtatctcaagtacaaggcaacttcgccttggagatccctgtggagttcagcatggttcccgtggctaaaatgctcatctacaccatcttgcctgatggagaagtgattgcagattctgtaacgtttcaagttgaaaaatgtcttcgcaacaaagtgcacctgagcttcagcccatcccaaagtcttccagcctcacaaacccatatgcgggttacagcttctcctcagtccctctgtggcctgagagctgtggaccaaagcgtgctgctgctgaagcctgaggctgagctctccccttccttgatatatgatctaccaggtatgcaagacagcaacttcattccaagttcttatcatccatttgaagacgaatatgattgtttgatgtaccaaccaagagacactgaagagctcacatactcagtaccatatggacgagagaaggatgtctacagatatgtgagggacatgggtttaacagcattcaccaacttgaagatcaaacatcctacatattgttatgaaatgaacatggttgtactatcagcacctgctgtggaatctgaactttcaccaagagggggagagtttgaaatgatgcccttgggagtaaataaaagtccactacctaaagagccaccacgtaaagatccaccacctaaagatccagttattgagaccattaggaattattttcctgaaacctggatctgggatttagtcacagtaaactcctcaggagtgactgaagtggaaatgacagtccctgacaccatcactgagtggaaggctggagccctctgcctgtctaatgacactggtcttggcctctcttctgtggcaactctccaagccttccagcccttctttgtggagctcacaatgccctactctgtgatccgtggagaagccttcatgctcaaggccacagtgatgaactacctccctacaagcttgccgatggctgtgcagctggaagcttctcctgatttcacagctgtcccagtgggaaatgaccaagattcttattgccttggtgccaatgggaggcacacctcatcctggttggtaactcccaaatctttagggaatgtgaatttctctgtgtctgtggaagcacaacagtccccagagctctgtggttctcaggtagccacagtgcctgaaaccgggagaaaggacacagtagtcaaagtcttgatagttgagcctgaaggaatcaagaaagagcataccttcagctcacttctctgcgcatcagatgctgagctgtcagaaacattgtctctgctgcttccaccaacagtagtgaaagattcagccagagcacatttctctgtgatgggtgatatcttgagttcagccataaaaaacacacaaaatcttatccaaatgccctatggctgtggggagcagaacatggtcctttttgctccaaacatctatgttctgaaatatctgaatgaaactcaacagctgacagagaagatcaagtccaaggcccttggttacctcagagctggttatcagagagaactgaactacaaacacaaagatggctcctacagtgcttttggggatcacaatggccagggtcaaggaaacacttggctcacagcctttgtgctcaagtcttttgcccaagctcgagccttcatcttcatcgacgaatcacacatcaccgacgccttcacctggctctccaagcagcagaaggacagtggctgcttcaggagctccggatcactgttcaacaatgccatgaaggggggagtcgatgatgaaatcaccctctctgcctatataaccatggcccttctggaaagttcactcccagacacggatcctgttgtctccaaagccctgggctgcctagaggcatcttgggagaccatagagcaaggaagaaatggcagctttgtgtacaccaagacactgatggcctatgctttcgctcttgcgggaaaccaggaaaagagaaacgaaatcctgaaatcccttgataaggaagctataagggaagacaactccatccactgggaaagacctcagaaacccacaaaatcagagggttatctgtacacaccccaggcttcctctgctgaagtagagatgagtgcctatgtcgtcttagctcgcctcactgcccagccagccccatcccctgaggacctggctttgtcaatgggcaccatcaagtggctcacaaagcagcagaattcccatggcggcttctcctccacacaggacactgtggtggcccttgatgctctgtccaaatacggagcagctactttttccaaaagccagaaaactcctttggtgaccattcaatcttcagggtcattttcccaaaagttccaagtagacaacagtaatcgcctgttactgcagcaggtctcattaccagacattcctgggaactataccgtcagtgtgtcaggggaaggatgtgtgtatgctcagaccacgctgagatacaacatgcccttggagaagcagcagcctgcatttgctctaaaggtgcagacagtacccctgacttgtaacaaccccaaaggccagaacagcttccagatctcactagaaatcagttacacggggagccgtccagcctccaacatggtgattgctgatgtgaagatgctctctggcttcatcccattgaaaccaacagtgaagaagcttgaaagattagagcacgtaagcagaacagaagtgaccaccaacaacgtcctgttatatttggaccaggtaaccaatcagacactgtccttctccttcatcattcaacaagacatcccagtaaagaacctgcagcctgccattgtgaaagtgtatgactactatgagacagatgaagtggcttttgctgaatacagcagcccctgcagctcagacaaacaaaatgtttgaaactcatatctgtggacaaggcattgctggaatccccaaaccagagaactttcaaggtggtgatttgtgtttgtctctgaaatacaaatactgaacaatcttggt

SEQ ID NO: 3532 - DNA, 861 bp, Rattus norvegicus
  Genbank Accession No. NM_023950
cgaaagtggagcaaggccggagctttgaccataaagcccaaggcggcggcgttggcgacggtgtttggggctggcagctccgaggagcctgctggagccggagtcgaacctctctgtcgcggcctgcgttgtgtctcctcctctgttgaccctgcgcttcaaggatgacctctaggaagaaagtgttgctgaaggtcatcatcctgggagactctggtgttggaaagacatcgctcatgaaccagtatgtgaataagaagttcagtaaccagtacaaagccacaataggagcagactttctgaccaaggaggtgatggtggatgacagacttgttaccatgcagatctgggacacagctggtcaagaacggttccagtctcttggtgtggccttctacagaggtgcagattgctgcgttctggtgtttgatgtgactgcccccaacacattcaaaacccttgacagctggagagacgagtttctcatccaggccagcccccgggatcctgagaacttcccttttgttgtgttgggaaacaagattgacctggaaaacagacaagtggccacaaagagggcacaggcttggtgctacagcaaaaacaacattccttacttcgagaccagtgccaaggaggccatcaatgtggaacaggccttccagacaattgctcggaatgcccttaaacaggaaacggaagtggagctgtacaatgaattccctgaacccatcaaactggacaagaacgagcgggccaaggcctccgcagagagctgcagctgttgaagaggcagtgagcacagagcacagagtccttcacagaccaagaacacacacgtaggccttcaacacgcgtccc

SEQ ID NO: 3533 - DNA, 3240 bp, Rattus norvegicus
  Genbank Accession No. NM_024002
ggcgcgccgcaggttttacggcgcgggctcttccgtggccgccatggcgtcggagcggccgcgggagcccgaaggcgaggatagcatcaagttgtcagctgatgtcaaaccatttgtccctaagtttgctgggctcaatgtggcgtggtcagagtcctcagaagcttgtgtcttcccaggctgtgcagccacttactatccattcgtacaggagtcaccagcggctgaacaaaaaatgtatcctgaagacatggcttttggagcccctgcctttccagcacagtacgtgtcttctgagatagcactgcatccttttgcctatcccacttacgccctcgagtccacacagagtgtttgctcagtgccaaccctgcagtacgattacagccaagcacagtgtcacccaggctttcggccagcaaagccccgaaatgagcacgcatgccctcctcaggaagcaaagtgtgtatttaagaaaaaatcctctgatgagagaagagcatgggaagagcaaaagtcaagcaacagaagggctgatggtgcagtgccctgtgaggcgagaccagccagagggtcatgccacctgaaatctgatggttatcacaagcggcctgatcggaagtccaggatccttacaaaaagtgcatctacctctaaacccgaatttgaatttagcaggttggactttcctgaactgcagagtccaaagaacagtaatctgccagagacacagaagcagcccaggtgggggcctcttggccctgctgccagtaacatgtctctcctgggagaagcgggcaagccagttgcagatatggtagagggtaaaatggtgaagacggatcacactgatggagctgtgactaacaatgccgctaccagttccccctcgtgtacacgagagttgtcttggacaccaatgggttatattgttcggcagacagtgtcttcagactcagcagcagcgactgaaactgttaattccatcataaacctaaagaagactacgtcatcagctgatgctaaaaacgttagcgtgacatctgaggcgttatcttcagatccttccttcagcagggaaaagcgtgttcatcctggtccaaaggccaaagcatcacaaggaagtgaacttgaacaaaacgaaagctccaaaaagaataagaaaaagaaagaaaagtctaaatcaagttatgaagtcctgccggttcaggagccaccgaggattgaagatgctgaggaattccccaacctgtcagttgcatctgaaagaagacacagaggggaatcaccaaaacttcagagtaaacagcaggcgcagaatgactttaaaacgggtggaaagaagagccaggttccggtgcagctggacctggggggcatgttggcagcactggagaagcagcagcacgccccgcacgccaagccatcctccagacccgtcgtgttctcagttggagcagtgccagtcctttccaaggatgcctcctcaggtgagaggggtcgccgctctagtcaggtgaagaccccacacaaccccctggactccagtgcccccctaatgaagaaggggaagcagagggagatacctaaggccaagaagcccacctcactgaagaagataattttgaaagaacggcaagagagaatgcagcagcgactccaagaaagtgctgtgagcccgactgtggccagtgatgactcacaggatgtggagagtggtgttactaaccaaatccccagcccggacaaccccacaggtccagagaagacagaagaacccatgtcttctacacctgtggttgagggtgagtcagaagagccagctggcacagagttccagagggacccagaggcttgccagcctgcccctgacagtgccaccttccccaagatccacagccggaggttccgggactactgcagccagatgcttagtaaagaagtcgatgcttgtgtcacgggtctcctcaaggaactggtgcgcttccaagaccggatgtaccagaaggatcctgtcaaggccaagacaaaacgccggcttgtgctggggctgagggaggtcctgaaacacctgaagctcaggaagctgaagtgtatcatcatctctcccaactgtgagaagacacagtctaaaggtggactggacgacacactgcacaccatcatcgattgcgcctgtgagcagaacatcccctttgtgtttgcactcaaccgcaaggcactggggcggagtctgaataaagcagttcctgtcagcattgtagggatcttcagttacgatggggcccaggaccagttccacaagatggttgagctgaccatggcagcccgtcaggcatacaagaccatgttggagacgatgcggcaggagcaggcaggagaacctgggcctcagacccctcccagcccacccatgcaggaccccatccagtccaccgacgaaggcaccctagcttccactggagaagagccacactatattgagatttggagaaagcatctggaagcgtacagtcagcatgccctggagctggaagactcactggaggcatcaacctctcagatgatgaacttgaatttataagaagagttcttgcctgtgtgtctgtgttttgggtaaggatggggaggtaggaaaaagacttccttctcagttctgtactgacctggtgtatttatgtgactgttgagttggaaatgcactggcctacgggcaaaggaagcaccaggtgtggcaccgttcatcatccgtcagatggacagacacccagacactcccgtgggcacccttcccaagagcctggtgattcagctttggttctctctgcactggatctggaaaatgctagagaatgtggtcctgggtactgtggctgcctaggaaccactatccacagcgccactggggatggtggaacaggagctgtgctccagggacggtagagggccctccttagggatggagccctgccactttgtgctgccaaggatttgctaagatgagcctcagaaaaaaattagtttctaacatgactttttgacataaattaatgcttttagtttttattttccaaagaagcagtatatatcaaatttgtagttttcagtttggtatctacaaatctttttactgaacagaggataaatgtggtttctgtcttggaggacagagcttacttgcgtgtttccctgcaagcaagagggcttatttgttagaataaagagtgattatttaatttc

SEQ ID NO: 3534 - DNA, 1408 bp, Rattus norvegicus
  Genbank Accession No. NM_024125
acgggaccgggacgcagcggagcccgcgggccccgcgttcatgcaccgcctgctggcctgggacgcagcatgcctcccgccgccgcccgccgcctttagacccatggaagtggccaacttctactacgagcccgactgcctggcctacggggccaaggcggcccgcgccgcgccgcgcgcccccgccgccgagccggccatcggcgagcacgagcgcgccatcgacttcagcccctacctggagccgctcgcgcccgccgccgcggacttcgccgcgcccgcgcccgcgcaccacgacttcctttccgacctcttcgccgacgactacggcgccaagccgagcaagaagccgtccgactacggttacgtgagcctcggccgcgcgggcgccaaggccgcaccgcccgcctgcttcccgccgccgcctcccgccgcactcaaggccgagccgggcttcgaacccgcggactgcaagcgcgcggacgacgcgcccgccatggcggccggcttcccgttcgccctgcgcgcctacctgggctaccaggcgacgccgagcggcagcagcggcagcctgtccacgtcgtcgtcgtccagcccgcccgggacgccgagccccgccgacgccaaggccgcgcccgccgcctgcttcgcggggccgccggccgcgcccgccaaggccaaggccaagaaggcggtggacaagctgagcgacgagtacaagatgcggcgcgagcgcaacaacatcgcggtgcgcaagagccgcgacaaggccaagatgcgcaacctggagacgcagcacaaggtgctggagctgacggcggagaacgagcggctgcagaagaaggtggagcagctgtcgcgagagctcagcacgctgcggaacttgttcaagcagctgcccgagccgctgctggcctcggcgggtcactgctagcccggcgggggtggcgtgggggcgccgcggccaccctgggcaccgtgcgccctgccccgcgcgctccgtccccgcgcgcgcccggggcaccgtgcgtgcaccgcgcgcacctgcacctgcaccgaggggacaccgtgggcaccgcgcgcacgcacctgcaccgcgcaccgggtttcgggacttgatgcaatccggatcaaacgtggctgagcgcgtgtggacacgggactgacgcaacacacgtgtaactgtcagccgggccctgagtaatcacttaaagatgttcctgcggggttgttgctgttgatgtttttgtttttgttttttgttttttgttttttttttggtcttattatttttttgtattatataaaaaagttctatttctatgagaaaagaggcgtatgtatattttgagaaccttttccgtttcgagcattaaagtgaagacattttaaaaaaaaacggcacgag

SEQ ID NO: 3535 - DNA, 711 bp, Rattus norvegicus
  Genbank Accession No. NM_024127
gggactcgcacttgcaatatgactttggaggaattctcggccgcagagcagaagatcgaaaggatggacacggtgggcgatgccctggaggaagtgctcagcaaggctcggagtcagcgcaccataactgtcggcgtgtacgaggcagccaagctgctcaacgtagacccggacaacgtggtcctgtgcctgctggctgcggatgaagatgacgaccgggacgtggctctgcagatccatttcaccctcattcgtgctttctgttgcgagaacgacatcaacatcctgcgggtcagcaacccgggtcggctggcagagctgttgctactggagaacgacaagagccccgctgagagcgggggcctggcgcagaccccggacttacactgtgtgctggtgacgaacccacattcatcacaatggaaggatcctgccttaagtcaacttatttgtttttgccgggaaagtcgctacatggatcagtgggtgccagtgattaatctccccgaacggtgattccccgaacggtgatggcatctgaatggaaataactgaaccaaattgcactgaagttttgaaatacctttgtagttactcaagcagtcactccccacgctgatgcaaggattacagaaactgatgtcaaggggctgagttcaactacaggagggctaggagatgactttgcagatggacagagaggtgaaaata

SEQ ID NO: 3536 - DNA, 628 bp, Rattus norvegicus
  Genbank Accession No. NM_024131
tgaattcctggaacctcaactggctcccactgctctctcggtgcagttaccgtttggcgatccctctcctgctaacatgccgttcgttgagttggaaacaaacttgccggctagccgcatacccgcagggctggagaaccggttgtgtgcggccacagccaccatcctggacaaacccgaagaccgcgtgagcgtgacgatacgaccgggcatgaccttgttgatgaacaaatccacagagccctgcgcccacctcctgatctcttccatcggtgttgtgggcaccgcggagcagaaccgcagccacagctccagcttcttcaagttcctcaccgaggagctgtccctggaccaggacaggatcattatccgattcttccccttggagccctggcagatcggaaagaaaggaactgttatgacgtttctgtgatggagacaaggaacgcagggcgtttgcttgagcctgtccagagcccttccagagaggcctcctggcagatacgataccagatccctcttttgcataagtgtctgtgatctcactgacctgttttcctctcccccagcctcgtgaacgagagagcaataaagaagagagcataatcccaaaaaaaaaaaaaaaaaa

SEQ ID NO: 3537 - DNA, 1213 bp, Rattus norvegicus
  Genbank Accession No. NM_024148
agacagactccattctttgtgcagtgaggggctccctgcctcgttgggaggcagcgtagtaaacactgcttcggtgctccagacgcctaagggctttcgttacagcgatgccgaagcgggggaagagagcggcagcggaagacggggaagaacccaagtccgagccagagaccaagaagagtaagggggcagcaaagaaaactgagaaggaggccgcaggagagggccctgtcctgtatgaggaccctccagatcagaaaacgtcagccagtggcaaatctgccacactcaagatatgctcctggaatgtggatgggcttcgagcctggattaaaaagaaaggcttggattgggtaaaggaagaagcaccagacatcttgtgcctccaagagaccaaatgctcagagaacaaactcccggctgaactgcaagagctgcctggactcacccatcagtactggtcagctccatcagacaaagaaggatatagtggtgtgggcctactttcccgccaatgcccgctcaaagtctcttatggcattggtgaggaagaacatgatcaagaaggccgggtgattgtggctgaatttgagtcctttatcttggtaacagcctatgttccgaacgcaggaaggggtctggtaagactggagtaccgacagcgatgggatgaagccttcagaaagtttctaaaggacttggcttcccggaaacctcttgtgctgtgtggggatctcaatgtggctcatgaagaaatagaccttcgtaaccccaaaggaaacaaaaagaatgctggttttactccccaggagcgccaaggctttggggaaatgctacaggctgtaccactggctgacagcttccggcatctctaccccaacactgcctacgcttatactttctggacttacatgatgaatgcccgctctaagaatgttggttggcgccttgattactttttgctgtctcactctcttttacctgctttgtgcgacagcaagatccggtccaaggctcttggcagtgaccactgtcccatcaccctttacctagcactgtgacactcccctcaagtagcttcatgctgggaaatagcctcctctcctccaggagaccagtgcgttatctcttcttcaggtgtttactcccctctaaaccaaacttctggtttcctttaaacaatccaagtgaaataaaagtcctacttttcaac

SEQ ID NO: 3538 - DNA, 1058 bp, Rattus norvegicus
  Genbank Accession No. NM_024149
cctccttctgctgttgctccccatccccccgcggccggccggttccagccctcgccccgcgtcccctgcccgcgcccccgccccgggccccgccatgggcctcacggtgtccgcgctcttttcgcggatcttcgggaagaagcagatgcggatccttatggttggcttggatgcggctggcaagactaccatcctgtacaaactgaagttgggggagattgtcaccaccatccccaccataggcttcaatgtggaaacagtggaatataagaacatctgtttcacagtctgggatgtcggaggccaggataagattcggcctttgtggcggcactacttccagaacactcagggcctcatctttgtggtggacagcaatgaccgggagcgggtccaggagtctgctgatgaactccagaagatgctgcaggaggatgagcttcgggatgcggtgctgttggtgtttgccaacaagcaggacatgcccaatgccatgcctgtgagcgaactgactgacaagctggggcttcaacacttgcgtagccgcacgtggtacgtccaggccacctgtgccacccaaggcacaggcctgtatgatggtctggactggctgtcccatgagctatcaaagcgctagccagccaggggcaggcccctgctgcccggaagctcccgcgtgcatcccgggatggccagactcccgggactcctcaggcagtgcccttccttcccacttttcctccccacagacaggcctctgctcctgtgcctgcctgcatgctctctcttgttgttggagcctggagccttgctctctgggcacagagggttctgctctcctgcctgctgggacctgtggaagggcttcctggccaaggccccctcttccaggggaggagcagggatctggatttaatttcgttttggttttggtttttttggtttttttctgttttgggtgtacccttggggccaggtttggggggaggaaagtgagggctccgggtggtgctatgatgtgggactggatattgagtaataaatttgctgtggtttgt

SEQ ID NO: 3539 - DNA, 1608 bp, Rattus norvegicus
  Genbank Accession No. NM_024151
gacagccgaacacttaacgccgcgccggagccaccgcaccagtcgccgagcaggtcccggtcccgctacgtcgtgtcccgcggctctgccgacactccggcctgagagacgggtcttcagccttttctcttccgcccactcagttgtgagccggaaccgtgaaggcccgagggcggaccagaccctctctttttttgaccatcaagtgccaccaccgctatgggcctcaccatctcctctctcttctcgcgcctcttcggcaagaagcagatgcgcattttgatggttggattggatgctgcgggcaagacgacgattctgtataaactgaaactaggggagatagtcaccaccattcctaccattggttttaatgtggaaacagtagaatataagaacatttgtttcacagtttgggatgttggtggtcaagataaaattaggcctctctggaggcattacttccagaatacccagggtctcattttcgtggtagatagcaatgatcgtgaaagaattcaggaaggagcagccgtgctgcagaaaatgcttctggaagatgagctgcaggatgctgtgctgctgctttttgccaacaaacaggatttgccaaatgctatggccatcagtgagatgacagacaagttaggtcttcagtctctccggaacagaacatggtatgtccaagccacttgtgctacacaaggaactggtctgtacgaggggctggattggctgtcaaatgaactttcaaaacgctaaatgaaactggatatctaaccaaggacatgtttgatagaattggtctaggcttgttacaacaaaattagtttgcatcttggttattaaaggatatctgagacggtttgggcagaaattacagcatttaaaacttgttttgttgccaattattgtttaccaagaacaatgttgctgtttagcaatatgcttgggtttaagagaaattctccttgggggaaaaaagtgtccattattatacttcccctgaacctgaatgcctggatagatagcgattgtgacacccttaaataaatctgttttgagtgttttttgagcccacaccaataatgttttaaagttacccccttggaactcactgatacctatcattcctcgggcagtctgctgagttaaaaatgtagcattccatttgtatttatttcccccttgccaaaaagatttttctaataatgcttgtactggccagggatgagctccacaacactattcagttttcttgtactgaggattcccccacctccctcacattattgactcctggcttctatcagccaaactttgatgtagtttggatttgatagctaattctgggctggtttcaaagagttcatattgagataacttttaatactcagcaaattgtcttcctttatattatcttttttatgttgcatgttgccttttggaatcagcctgactctttgcccagcatatgatagttctgctggtattttactgtttactgatgaacatatcttcattaagaattttttgaaaactcatcaaattcaatgaataagttttcttcataacccatttggaattattcctaataaaatgattttt

SEQ ID NO: 3540 - DNA, 995 bp, Rattus norvegicus
  Genbank Accession No. NM_024152
agcaggcacgttcgcgcaagccgggccgcagggcgtcctcgcggcggggcggctacttttcgggctcgcagcggcggcggcgttgtaggctgaggggacccgggacacctgaatgcccccggccccggctcttccgacgcgatggggaaggtgctatccaagatcttcgggaacaaggaaatgcggatcctcatgctgggcctggacgcagccggcaagacaacgatcctgtacaagttgaagctgggccagtctgtgaccaccattcccacggtgggtttcaacgtggagacggtgacttacaaaaacgtcaagttcaacgtgtgggatgtgggcggccaggacaagatccggccgctctggcggcattactacaccgggacccagggtctgatcttcgtggtagactgcgccgaccgggaccgcatcgatgaggcccgccaggagctgcaccgcattatcaatgaccgggagatgagggacgccataatcctcatcttcgccaacaagcaggacctgcctgatgccatgaaaccccatgagatccaggagaaactgggcctgacccggattcgggacaggaactggtatgtgcagccctcctgtgccacctccggggacggactctatgaggggctcacatggttaacctctaactacaaatcctaatgagcgccctccacccagcccccggaaggagagaaatcaaaaacccattcataggattatcgccaccatcatcacctctttcaattgccactctcttttttgaaactgaactcgagttactgttctaccgtttagtggggttgggggttttctttgttccccttaccccccctcttctatttcctttcggctttgcgttaggatgctctgatctgacatttgacacgaatacagtgctatatgctcttgtgacttccagcaaacggggtaatagcaactcttggtaaagtcctttataataatggttgattttttttttttatttc

SEQ ID NO: 3541 - DNA, 1786 bp, Rattus norvegicus
  Genbank Accession No. NM_024153
cggcgggttgctcttctcagccatggctcctcgctgctggcgctggtggagctggtccgcgtggcctggggttcggccgcttccctccaggagcactccgacccctggcttctgcaagaagttctccacacaggagacaacccctcagatctgtgtggtcggcagtggcccagctggcttctacacagcccaacacttgttgaagcaccacacccgggcccacgtagacatctatgagaagcagctcgtccccttcggcctggtgcgctttggtgtggcacctgaccatcctgaagtaaagaatgtcatcaacacatttacacagacagcccgctcagaccgctgtgccttccggggcaatgtggtggtgggcagggacgtgtccgttccagagcttcgggaagcctaccatgctgtggttctgagttatggagccgaggaccaccaacccctggaaattcctggcgaggagctgcctggagtggtctcagcccgggcctttgtgggctggtacaatgggcttcctgagaaccagaagctggctccggatctgagctgtgacacggctgtgattctggggcaagggaatgtggctctggatgtggcccggatcctgctgaccccacctgagcacctggagaaaacagacatcacagaggttgcactgggggtcctgaggcagagtcgggtgaagactgtgtggatagtgggtcggcgtggacccctgcaagtagccttcaccattaaggagcttcgggagatgattcagttgccaggaacccagcccattttggatccttcggatttcttgggcctccaggacagaattaaggatgtcccccgtccaaggaaacggctgacagagctgctgcttcggacagccacggagaagccaggagtggaagaggctgcccgccgggcactggcctctcgggcctggggcctccgctttttccgaagcccccagcaggtgctacccaccccagatggtcgacgggtagcaggcatccgcctggcagttaccagactggagggtgttggtgagtccacacgggcagtgcccacgggagatgtggaggacctcccttgtgggctgctgctgagcagtgttgggtataagagccgtcccatcgaccccagcgtgccctttgaccccaagcttggaatcatccccaacacagagggccgggttgtgaatgcaccaggcctctactgcagtggctgggtgaagaggggacccacaggtgtcatcaccacaaccatgacagacagcttcctcaccagccaggtgctgctgaaggacctgaaggccgggctgctgccctctggccccagacctggctatacagccattcaagccctgctcagtgatcgaggggtccggccagtctctttctcagattgggagaagttggatgctgaggaagtagctcgaggccagggcactgggaaaccaagggagaagctggtggatcgaagagagatgctgcagctgctggggcactgaacctgggccccagaccccaccgtacaagaagagctgtgctgggttggcagttgggttacagtgctgactgtcctggcttggaggccgacctgtggcctttccagggccctctgagctctgcctcagttaacctcccagtgtgggtttaggcccaggagggaacctgagctagggatggatggaggtacggacagaccctacccatcttgtttccttcctgtcggacgatggtaggcctctagactggaacacagtggaaataaaacagacgtgcctaag

SEQ ID NO: 3542 - DNA, 960 bp, Rattus norvegicus
  Genbank Accession No. NM_024155
atggaaaccaaaggaggaactgtgaaagctgcttcaggattcaatgcaactgaagatgcccaggtcctgaggaaggccatgaaaggtctgggtactgacgaagatgccattatcggagtcttagcctgccggaacactgcccaacgccaggaaatcaggacggcctacaagagcaccattggcagggacctgcttgaggacttgaagtcggagctgagcagcaacttcgagcaggtgatcctgggcatgatgacgcccacagtgctgtatgacgtgcaggagctccggagggctatgaagggagctggcacggacgagggctgtctgattgagatcctggcctctcgcaaccctgaggagatccgtcgcatcaaccagacataccagcagcaatatggaaggagccttgaagaggacatctgctctgacacatccttcatgttccagcgagtactggtgtccctgacagcgggtggcagggatgaaggaaattacctcgatgatgcgctcgtgaggcaggatgcccaggatctgtatgaggctggagagaagagatgggggacggatgaagtgaagttcctaagcattctctgttcccggaaccggaaccacctgctccatgtgtttgatgaatacaaacggatctcacagaaggacattgaacagagcattaagtctgagacatctggaagctttgaagatgctctgctggctatagtgaagtgcatgaggaataaaccggcctattttgctgaaaggctttataaatccatgaagggcttaggcactgacgacagcaccctcatcagagtgatggtgtctcgaccagagattgacatgctggacatcccggcaaacttcaagagggtgtacgggaagtctttgtactcttttatcaaaggcgacacttctggagactacaggaaggttctgctcattctctgtggaggagatgattaa

SEQ ID NO: 3543 - DNA, 2021 bp, Rattus norvegicus
  Genbank Accession No. NM_024157
atgaagctcgctctgcttattctgctactcttgaatcctcacttgagttcttccaagaacacaccagcctcaggtcagcctcaggaggatctggtagagcagaaatgcttactgaaaaactacacgcatcactcctgtgacaaagtcttctgccagccatggcagaaatgtatcgagggaacctgtgcctgcaaactcccttaccagtgcccaaaggccgggaccccggtgtgcgccactaatggaagaggctacccgacatactgtcacctgaagagtttcgaatgtcttcacccggagataaagttctcgaataatggaacatgcacagctgaagaaaagtttaatgtttccttaatttatggaagcacagatacagagggaattgttcaagttaaactcgtggaccaagatgagaaaatgttcatatgtaaaaatagctggagcaccgtggaagccaacgtggcctgcttcgacctcggatttccactgggtgttcgtgacatacaaggaaggtttaatatacctgtaaatcacaaaataaactccaccgaatgcctgcatgtgcgttgccagggagtagagaccagtttggcagagtgtacctttaccaagaagagttcgaaggctccccatggcttggcaggtgtagtgtgctacacacaggatgcagatttcccaacaagtcagtccttccagtgtgtgaatgggaagcgcattcctcaggagaaagcctgtgatggtgtcaacgactgtggagatcaaagtgatgagctgtgttgcaaaggttgccgaggccaagccttcctttgcaagtcgggagtttgcatcccaaaccaacgtaagtgtaacggtgaggtggactgcatcaccggcgaggacgagagtggctgtgaagaagacaaaaagaataaaattcataaaggccttgcacggtcagaccaaggaggagaaactgaaattgagactgaagaaacagaaatgttgactcctgatatggacacagaaagaaaacggataaagtccttattacctaaactatcctgtggagtcaaaagaaatactcacattcgcaggaaaagagtggtcggagggaagccagccgagatgggagattacccatggcaggtggcgattaaggatggagatagaataacctgtgggggcatttatatcggtggctgttggattctgacagctgcacactgtgtcagacccagtagatatcgcaactaccaagtatggacgtctttattagactggctaaagcctaactctcagttggcagttcagggagtgagcagagttgtcgttcatgaaaagtataacggagccacctaccagaatgacatagctttggttgaaatgaaaaaacacccgggcaagaaagaatgtgagctcatcaattctgtccctgcctgtgtcccatggtctccatatctattccaaccgaatgacagatgcatcatttctggatggggtcgagaaaaagataaccaaaaagtctactcactcaggtggggcgaagtcgacctaataggcaactgctcgaggttttacccgggtcgctactatgaaaaagagatgcagtgtgcgggtaccagtgatgggtccattgatgcctgcaaaggagactctggaggccccttggtctgcaaggatgtcaacaatgtcacttatgtttggggcattgtgagctggggagaaaactgtgggaaaccagagttcccaggtgtttacaccagagtggccagctattttgattggattagctactacgtgggaagaccccttgtttctcaatacaatgtctgaagctacgacctccttctttctgcacttcttctttccagggttatactttaattgaaatgaaactgtataattagttctcctcgatgctggcaagaagcaagtcttactggctagttcctaaagtttcttcaaagtttatgccattttagaattctgtcatataatccccaataaatattccagttaagcacacaaaaaaaaaaaaa

SEQ ID NO: 3544 - DNA, 3170 bp, Rattus norvegicus
  Genbank Accession No. NM_024159
cccgtcatgtctaacgaagtagaaacaagcacaaccaatggtcagcctgaccaacaggctgcaccgaaagcaccatcaaagaaggaaaagaagaaaggttctgaaaagacagatgagtatctgttggccaggttcaaaggtgatggtgtaaaatacaaggccaagctaatcggtattgatgatgtgcctgatgcgaggggagacaaaatgagtcaggattctatgatgaaactcaagggaatggcagcagctggtcgctctcagggacagcacaagcaaaggatctgggtcaacatttccctgtctggcataaaaattattgatgagaaaaccggggtaatagagcatgaacatccagtaaataagatttccttcattgctcgtgatgtgacagacaatagagcatttggttatgtgtgtggaggagaaggccagcatcaattttttgctataaaaacagggcaacaggctgaaccattagtcgtcgatcttaaagacctttttcaagttatctataatgtaaagaaaaaggaagaagaaaagaaaaaggttgaagaagccaacaaagcggaagagaatgggagtgaggccctaatgacccttgatgatcaagctaacaaactgaagctgggtgttgaccagatggatttgtttggggacatgtctacacctcctgacctaaataatccaacagaaagcagagatatcctgttagtggatctaaactctgaaatcgacaccaatcagaactctttaagagaaaatccattcttaacaaatggagtcacctcctgttctctccctcgaccaaagcctcaggcatccttcttgcctgaaagtgccttttctgccaatctcaacttctttcccacccctaatcctgatcctttccgtgatgatcctttcgcacagccagaccaatcggcaccctcttcgtttcattctctcacatctgcagatcagaagaaagcgaatccgggtagcttgtctactccacagagtaaagggcccttgaacggtgatactgattactttggtcagcaatttgaccagatctctaaccggactggcaaacaggaagctcagggaggcccatggccctatccaagttcgcaaacccagcaagcagtgagaactcaaaatggggtatctgaaaaagaacagaacggcttccatatcaaatcttccccgaacccttttgtgggaagccctcccaaaggactatcggtaccgaatggcgtaaagcaggacttggaaagctctgtccagtcctcagcgcatgactccatagccattatcccacctccacaaagtaccaaaccaggaagaggcaggaggaccgctaagtcttcagcaaacgacctgcttgcttcagatatctttgcctcagaacctccaggccagatgtcccccacaggacaacctgcagtcccacaggcgaactttatggatctcttcaaaaccagtgctcctgccccaatggggtcggggcccctcgtaggtctaggtactgtcccagtaacacccccccaagcaggaccttggacacctgttgtcttcactccttctacaactgtggtcccaggagccataataagtggccagccttccggttttggtcagccactcgtctttggtacaaccccagcagtgcaagtttggaatcagccttcatcatttgcaactgcagcttcccctccacccccggcagtttggtgtcctaccacatctgtggcacccaacacttggtcatccacaagtcccctggggaatccttttcagagtagtaatatctttccaccttccaccatatccactcagtcctttcctcagcctatgatgtcctctgttctggtcacacctccccaaccacctccccgaaatggcccactaaaggacactcttagtgatgccttcactggcttagacccacttggggataaagaggtcaaggaagtgaaagaaatgtttaaggacttccagctgcggcagccacctcttgtaccctcgaggaagggggagacaccttcctctgggacctcaagcgccttctccagttacttcaacaataaagttggcattcctcaggagcatgtagaccatgatgattttgatgccaatcaactgttgaacaagattaatgaaccaccaaagccagcccccagacaaggtgtcctctcgggtaccaaatctgctgacaattcactcgagaaccctttctctaaagggttcagctcaacaaacccctccgtggtctctcagcctgcatcttctgatgcccacaggagcccttttggaaatccttttgcctaacttctttctgaagttgtaatgctgactgactatccagatgagcaaaaggctggctttggtcaaggattaagcagatagccagaaacgtgctgacctctgtccttgctccagctttgatgtattacctgttaccctacttgtctttgcctcatgtacttgtaaaaagcctttcactctctctaggctaaagctacactgaaacaatggctttacataaattaaactcctaagctctctagctccaatataaatgaagtagcttccctaccaaatccttgtctgtcgtgctcctagaaccttccagaatattctccgttttaccctcaatttgggaggtgtggccacctttacccttaatatcacactgccttgagtaaatgtccaaatccttgtagctctcaaggtcatttgtgattcctggtgtgcatcataaatctaaacattaatattaacattaataggaaagcaagacaccttgcttcccattcccactcagacaagtttttttatgataaaatgaaagcaagactaacttctcgaatccacccaaggaccatttcgagatggtctttctcagctaattgcatcatttaccaatcctactccaagtggtgtttacatttgacttgaaaaggagaaaggtctaactcaaaacataaggcattattcaaagctaataaaacaatttctccctggggccccacattgttttcattccagacactttgcagctgtttgaccctgatgatattatgccctacattttccttgaagattctgattttatttcatgtgattcttttttctcaataaagatgattattgtgtgcatttactaaacaaacaaaaaaaaaaaa

SEQ ID NO: 3545 - DNA, 709 bp, Rattus norvegicus
  Genbank Accession No. NM_024160
ccacgcgtccgggaccgagcggctgcgtgtgctgggtcctcaccatggggcagatcgagtgggccatgtgggccaacgaacaggcgctggcatctggcctgatcctcatcacagggggcatcgtggctactgcgggacgcttcacgcagtggtactttggtgcttactctattgttgcaggagtgctcatctgtctgctggagtacccccggggaaagaggaaaaagggctccaccatggagcggtgtggacagaagtacctgaccgctgtggtgaagctgttcgggcccctcaccagaaattactacgtccgggctgtcctccacttactgctgtccgtgcctgcaggcttcctgctggccaccatcctggggaccgtctgcttggccattgccagtgtgatctacctgctggcagccatccggggtgagcagtggactcccattgagcctaaacccaaggagcggccgcaggttggaggcaccatcaagcagccacctaccaaccccccaccccggccaccagcggaggtccgcaagaagccaagtgaggccgaagaggaggcagcctcggcaggaggaccccaggttaacccaattccagtgacagatgaggtcgtgtgaccttcagtggctcctgcttgagtttccaaggtgttgctcccagagggtggtgatgcccactgtaataaacatggttaatagctggt

SEQ ID NO: 3546 - DNA, 2640 bp, Rattus norvegicus
  Genbank Accession No. NM_024163
gaattccgccgggcagggcgcacgtggtgggcgccccctgcgggaagcggggcgctggggagccccggccgcgggctcgggcgcgcagagccggggccatgtggacgggcggccggcggccgggccggcttcgccgggcggcctctgccgcagacatggagaaactcagtgcgctgcaggaacagaagggcgagctgcgcaagcgcctgtcctacaccacgcacaagttggagaagctggagacggagtttgactccacccgccactatctggagattgagctgaggcgcgcacaggaggagctggacaaggtcaccgagaaactgcgcaggattcagagcaactacatggcactccagaggatcaaccaagagctggaagacaagctgtaccggatgggccagcactatgaggaagagaagcgtgccatgagccacgagattgtcgccctcaacagccacctgctggaggctaaggtgaccattgacaagctgtcagaagacaacgagctctataggaaggactgcaatctagcggcccagctgctgcagtgcagccagacctacggcagggtccataaggtgtccgagctgccctcggacttccagcagcgtgtgagcctgcatatggagaagcatggctgcagcctgccgtccccactgtgccatccgtcctacgccgacagcgtgcccacctgcgtcatcgccaaggtgctggagaagcccgaccctggcagcctgtcctcgcgcatgtcggatgcctcggcccgcgacctggcctaccgcgacggagtggagaacccgggcccgcgacccccgtacaagggagacatctactgcagcgacacggctctctactgccctgacgagcgagatcacgaccggcggcccagcgtggacacgccggtgaccgacgtgggcttcctgcgtgcgcagaattccaccgacagcctggcggaagaggaggaggccgaggcggcggccttcccggaggcctaccgtcgcgaggccttccagggctacgcggcctcgctgcccacgtccagctcctactccagcttcagcgccacgtccgaggagaaggagcacgcgcaggccagcacgctgaccgcctcgcagcaggccatctacctgaacagccgcgaagagctcttcagccgcaagccgccctccgccacctacggcagcagccctcgctacgccaaggccgcggccaccctgggctccccgctcgaggcccaggtagccccaggcttcgctcggactgtgtctccgtacccggccgagccctaccgctatccggcctcccagcaggctctcatgcctcccaacctgtggagcctgcgggccaagccgagcggtaaccggcttgccgcccgggaggacattcgaggccagtggcggcccctgagcgtggaggatgtgggcgcctactcttaccaggccggcgctgcaggccgcgccgcctcgccctgcaacttctcagaacgtttctacggcggcggtggcggcggcggcagcccgggcaagaatgccgagggccgtgccagccccctctatgccagctacaaagccgatagtttctcggagggcgatgacctctcccagggtcatctggccgagccctgcttcctccgagcgggtggtgatctgagcctcagccccagccgttcagctgatcctctccctggctatgccaccagtgacggggatggggataggctcggggtgcagctgtgtgggcctggcagtagcccggagcccgagcacggctcccgggattccctggagcctagctccatggaggcctctcccgaaatgcaccctccaacccgcctcagcccccagcaggccttcccaaggactggaggctctgggctgagccgcaaggacagtctcactaaggcccagctctacggaaccctgctcaactgactgccatcagcaggctgcagtcaggggctccctaccaccctgccccatatagggagtagctaaccccctcgtcccaacccctgctaaggaactccagttccagttccagttcctgttccagttccagttcctgttccagttcctgttccagttccagttcccgttcctgttccagttcctgttccagttccagttcccgttccagttcccgttcctgttccagttcccgttccagttcctgttccagttccagttcctcctgaccctgttactaacaccccagtagaacctgaaaagaccccctctgccaatcgtcttgtccaccccagcctctgctgcaaaccctacccagaatatttccgctctgcacccttccctgaagtgagcatcccctgttttataagtgaagctatttttttagggaaaaagagcgtttgttcacgcacttgctgccaacttctggatggcagccttggcgtaccccacacgaagttccttcatttccagtgagggtgcttggggcctgccccagggaaggggaggctggggccctagagggaccagtctccacaagtagggagaagccagcaacaagggaattctgaagttctgaacactgaggaggggaaccaaagccacttagggcgcagaaaatgtcttatgctcgctcccgtgtcacagtgcagccagcctcgtgccgaattcc

SEQ ID NO: 3547 - DNA, 585 bp, Rattus norvegicus
  Genbank Accession No. NM_024349
atggaagacaagctgaagaaggccaagatcatcttcgtggtgggcgggcctggctcaggaaaaggtacccagtgtgagaagattgtgcagaaatatggctacacccacctctctactggggacctgcttcgggcagaagtcagctctggatcgtcgaggggcaagatgctgtcatctatcatggagaagggagagctggtgccactggagacggtgctggacatgcttcgggatgctatgtttgccaaagtggactcttccaacggcttcttgattgacggctaccccagggaggttaaacagggagaagagtttgaacggaagatcgcacagcccacactgctactgtatgtggacgcaggccccgagaccatgacccaacgactcctaaagcgaggggagaccagtggccgtgtggacgataacgaggagaccatcaagaagaggctggagacgtattacaaagccacagaacctgtcatctccttctatgacaaacgcggcattgtgcgcaaggtcaatgctgaaggctcagtggacactgtcttctcccaggtttcgacctatcttgactccctgaagtaa

SEQ ID NO: 3548 - DNA, 2073 bp, Rattus norvegicus
  Genbank Accession No. NM_024351
gtctctgtgtggtctcgtcatcagcacagctgggcctacacgcaagcaaccatgtctaagggacctgcggttggcattgatcttggcaccacctactcctgtgtgggtgtcttccagcatggaaaggtggaaataattgccaatgaccagggtaaccgcaccacgccgagctatgttgctttcaccgacacagaacgattaattggggatgcggccaagaatcaggttgcaatgaaccccaccaacacagtttttgatgccaaacgtctgatcggacgtaggttcgatgatgctgttgttcagtctgacatgaagcactggcccttcatggtggtgaacgatgcaggcaggcccaaggtccaagtcgaatacaaaggggagacaaaaagtttctatcctgaggaagtgtcttcaatggttctgacaaaaatgaaggaaattgcagaagcttaccttggaaagactgttaccaatgccgtggtcaccgtgccagcttacttcaatgactctcagcgacaggcaacaaaagatgctggaactattgctggcctcaacgtacttcgaattatcaatgagccaactgctgctgctattgcctatggcttagataagaaggtcggggctgaaaggaatgtgctcatttttgacttgggaggtggcacttttgatgtgtcaatcctcactatcgaggatggaatttttgaagtcaaatcaacagctggagacacccacttgggcggagaagactttgacaaccgaatggtcaaccatttcattgctgagtttaagcgaaagcacaagaaggacatcagtgagaacaagagagctgtcaggcgtctccgcactgcctgtgagcgggccaagcgcaccctctcctccagcacccaagccagtattgagattgattctctctatgagggaattgacttctacacctccattacccgtgctcgatttgaggagttgaatgctgacctgttccgtggcacactggaccctgtagagaaggcccttcgagatgccaaactagacaagtcacagatccatgatattgtcctggtgggtggttctaccagaatccccaagatccagaaacttctgcaagacttcttcaatggaaaagagctgaataagagcattaaccccgatgaagctgttgcctatggtgcagctgtccaggcagccattctatctggagacaagtctgagaatgttcaggatttgctgctcttggatgtcactcctctttcccttgggattgaaactgctggtggagtcatgactgtcctcatcaagcgcaataccaccattcccaccaagcagacccagactttcaccacctactctgacaaccagccaggtgtactcatccaggtgtatgaaggtgaaagggccatgaccaaggacaacaacctgcttgggaagtttgagctcacaggcatacctccagcaccccgtggggttcctcagattgaggttacttttgacattgatgccaatggcatcctcaatgtttctgctgtagataagagcacaggaaaggagaacaagatcaccatcaccaatgacaagggccgcttgagtaaggaggatattgagcgcatggtccaagaagctgagaagtacaaagctgaggatgagaagcagagagataaggtttcctctaagaactcgctggagtcttatgctttcaacatgaaagcaactgttgaggatgagaaacttcaaggcaagatcaatgatgaagacaaacagaagattcttgacaagtgcaacgaaatcatcagctggctggataagaaccagactgcggagaaggaagaatttgagcatcagcagaaagaactggagaaggtctgcaaccctatcatcaccaagctgtaccagagtgctggtggcatgcctggaggaatgcctggtggcttccctggtggaggagctcctccatctggtggtgcttcttcaggccccaccattgaagaggtcgattaagtcaaagtagagggtatagcattgttccacagggacccaaaacaagtaacatggaataataaaactatttaaattggcacc

SEQ ID NO: 3549 - DNA, 1016 bp, Rattus norvegicus
  Genbank Accession No. NM_024356
gacttcgaacctcattcggtgcagaactcctgtcccggtgacagccacaggtcacggccgccggctaagccgagccgcagcgcttggtagcaccttagggtgtctcgggagcaatcgcgccgggtccatggagaagccgcggggtgtaaggtgcaccaatgggttccccgagcgggagctgccgcggcccggggccagccgacctgccgagaagtcccggccgcccgaggccaagggcgcacagccagccgacgcctggaaggcagggcggccccgcagcgaggaggataacgagctgaacctccccaacctggcggccgcttactcgtccatcctgcgctcgctgggcgaggacccccagcggcaggggctgctcaagacgccctggagggcggccaccgccatgcagttcttcaccaagggataccaggagaccatctcagatgtcctgaacgatgctatatttgatgaggaccatgacgagatggtgattgtgaaggacattgacatgttttccatgtgtgagcatcacctggtcccatttgtgggaagggtccatattggttatcttcctaacaagcaagtccttggtctcagcaaacttgccaggattgtggaaatctacagtagaagactacaagttcaagaacgccttaccaaacagattgcagtggccatcacagaagccttgcagcctgctggcgtcggggtagtgattgaagcaacacacatgtgtatggtcatgcgaggtgtgcagaaaatgaacagcaagactgtcactagcaccatgctaggcgtgttccgggaagacccaaagactcgggaggagttcctcacactcatcaggagctgaacttccgtgtgcgagccccggtttgcagacccccgctgaggccagcgttatctgtctcgattgtacattccagttccagttggtatacttgtcaactttatttctcaccatgaattgtatttaataattatttatagagatgtcaaataaaggtgatcaactt

SEQ ID NO: 3550 - DNA, 1201 bp, Rattus norvegicus
  Genbank Accession No. NM_024363
agatggcggcagccgaggccgcgaactgcatcatggaggtttcctgtggccaagcagaaagtagtgagaagcccaatgctgaggacatgacatccaaagactactactttgactcctatgcccactttggcatccacgaggagatgctaaaggatgaggtgcgaaccctcacgtaccgcaactccatgtttcacaatcggcatctcttcaaagacaaggtggtgctggatgtgggctcgggcactggcatcctctgcatgttcgctgccaaggcaggggcccgcaaggtcattgggatcgagtgctccagtatctctgattatgctgtgaagattgtcaaagccaataagttagaccacgtggtgaccatcatcaagggcaaggtggaggaggtggagctgcctgtggagaaggtggacatcatcatcagcgagtggatgggttattgcctcttctatgagtccatgctcaacactgtgctgcacgctcgtgacaagtggctggcacctgatggcctcatcttcccagaccgagccaccctgtatgtgacagccattgaggaccgacagtataaagactacaagatccactggtgggagaatgtatatggctttgatatgtcctgcattaaagacgtggccatcaaggagcccctggtggacgtggtggacccaaagcagctggtcaccaacgcctgcctcataaaggaggtggacatctacacagtcaaggtggaggacctgaccttcacctccccgttttgtctgcaagtgaagaggaatgactatgtgcatgcactagtggcctacttcaacatcgagttcacccgatgccacaagaggaccggcttctctaccagtcctgagtctccatacacacattggaagcagactgtgttctacatggaggactacctaacagtgaagaccggcgaggagatttttggcactattggaatgaggcccaacgccaaaaacaatcgtgacttggactttaccatcgacctggacttcaagggtcagctgtgtgagctctcttgttccaccgactaccggatgcgctgaggaggtgccaggctggccctcctgcaaaagggggctcaggggctgggcttgggggatgggagggtacatcgtggcagtgtttttcataacttatgtttttatatggttgcgtttatgccaataaatcctcagctgac

SEQ ID NO: 3551 - DNA, 1929 bp, Rattus norvegicus
  Genbank Accession No. NM_024365
tagccaggaaccccacccccatcttatggcatccccggtggccctattccatcccagggctctcatccagccccaagctaactttcattgactcgtcacatcagtacccctccccaaacttcttacccgagtactccaggtggccctgccgtaggaggcacccctacaactcctcccgatctcttgaaatcgctgctcgatgacctaagaaccccgttttgccaatactactctaaggtgcagcttcctttctcctcctttgccttcaccctgtacctgcagtcaccatatcccgtcttggtcctcaacccagtccccatggttccagagccaggccctgtcaacagtagcaccccagcctggggtcccgggccaccgcctgctccggggggcagcggctgggtggctgccgcgctgtgcgtggtcatcgtgctgacagcagccgccaattcgctgctgatcgtgctcatttgcacgcagcccgcgctgcgcaacacgtctaacttctttctggtgtcgctcttcacgtcggacttgatggtggggttggtggtgatgcccccagccatgctgaacgcgctgtatgggcgctgggtgttagctcgaggcctctgtctgctttggactgccttcgacgtgatgtgctgcagcgcctccatcctcaacctctgcctcatcagcctggaccgctacctgctcatcctctcgccgctgcgctacaagctgcgcatgacagccccgcgagccctggcgctcatcctgggtgcctggagcctcgcggcgcttgcctccttcctacccctcttgctgggctggcacgaactgggcaaagctcgaacacctgcccctggccagtgccgcctattggccagcctgccttttgtcctcgtggcgtccggcgtcacctttttcctgccttcgggtgccatctgcttcacctactgcaggatccttctggctgcccgcaagcaggcggtgcaagtggcctcgctcaccacgggcacggctggccaggccttggaaaccttgcaggtgcccaggacaccacgcccagggatggagtccgctgacagtaggcgtctggccaccaagcatagcaggaaggccttgaaggccagcctgaccctgggcatcctgctgggaatgttctttgtcacctggctgcccttctttgtggccaacatagctcaggccgtgtgtgactgcatctccccaggcctcttcgatgtcctcacatggctggggtactgtaatagcaccatgaaccctatcatctacccgctctttatgcgggacttcaagagggccctgggcaggttcctgccatgcgtccactgtcccccggagcaccggccagccctgcctccccctccatgtggacctctcacagcggtgccagaccaggcctcagcctgcagcaggtgctgcctctgcctctgccgccaaactcagattcagactccgcttcagggggcacctcgggcctgcagctcacagcccagcttctgctgcctggagaggccacccgggaccccccgccacccaccagggccaccactgtggtcaacttctttgtcacagactctgtggagcctgagatacggccgcatccactcagttcccccgtgaactgaccaggtcaagagctggccattggaggccacattcccggagctctcagcccactctccctgagactaggaggtggtaggtctcctgagagtgtgctgaattgaggtatcctcagctagccccatcttctgctgcaggctccttgacctgaggggtagtcagaaacatctctgtggggtactccagtgcaatgttgcttgtgtagtgtggctgggaggggggcggtctcagagccgggccatttggttcaggtcagtaggaaagcaatctgtcctcatccctttctctcatggtggg

SEQ ID NO: 3552 - DNA, 1370 bp, Rattus norvegicus
  Genbank Accession No. NM_024369
ctggcctccaactcactgcttccatcctgcccagtgtcctctcgagtcccggacccgagcacgatgtggaaacgctggctggcgctcgcgctggtgaccatcgccctggtccacggcgaggaggaacaaagaagcaaatccaagatctgcgccaatgtgttttgtggagctggccgggaatgcgccgtcacggagaagggggagccaacgtgcctctgcattgagcaatgcaaacctcacaagaggcctgtgtgtggcagtaatggcaagacctacctcaaccattgtgaacttcacagagacgcctgcctcactggatccaagatccaggttgattatgatgggcactgcaaagaaaagaagtctgtgagtccatccgccagccccgttgtctgctatcaggctaaccgtgatgagctgcggcgccggatcatccagtggctggaagccgagatcattccagatggctggttctctaaaggcagtaactacagtgagatcctagacaagtactttaagagctttgataatggtgactctcacctggactccagcgaattcctgaaattcgtggagcagaatgaaacagccgtcaacatcaccgcttaccccaatcaggagaacaacaaactgctcagaggcctctgtgttgatgccctcattgaactgtccgatgagaacgctgactggaaactcagcttccaagagttcctcaagtgcctcaacccatccttcaaccctcctgagaagaagtgcgccctggaggacgaaacctatgcagatggagctgagaccgaggtggactgcaatcgctgtgtctgttcctgtggacactgggtctgcacagcgatgacctgtgatggaaagaatcagaagggggtccagacccacacagaggaggagatgacgagatatgcccaggaactccagaagcaccagggaacagcagaaaagaccaagaaggtgaacaccaaagagatctaagaagaggcacgtagcacctcatctggaacccagcacctcctcttcagcgctaagcccagtatacagcgtctgtggcaatcaccgaatcaccagtatttgcttgtacggcagcaaatcttatctgtttgttttgcaataaaggaagtgagggtggctggctagccagggcaggcaggccacaactttcacttctaggaatgctttaagagacactaaagggcaccttggggcaggaggcgagtatccggttggcagaggagcagaggcaggtctgaatgaaacctttctggggtcagctgtgaggatacaacaggaaaagcatgtgatgttagggggaacactgagctggccctgctggaggaaatagggggagcttggtggggagg

SEQ ID NO: 3553 - DNA, 2411 bp, Rattus norvegicus
  Genbank Accession No. NM_024375
gccggcgcgggctcggctgagctccacgcggctcaggacagccgtgaccactgaccgggcggcgtggatgctcagcaagcagctctgccaccgcgagccaatcccgatacatcgagtcgggtcgtcggggctgtccgagtccccacagacactccagccgtggaccaggtgcacagccaacactgagccttccctgtctgccctcctgggctcagacccttcaccactgtcactcagccatggctccaggtcttgctcggatcagcttgaggtctcagctgctgcccttggtgccgctgctcctgctactgcggggcgcaggctgcggccacagagtcccctcatggtcctcactgccttcagcagctgacagtgtgcagagggacagggacctccagcagtcacccggggacgctgcagccgctctgggtccaggcgcccaggacatagtcgctgtccacatgctcaggctctatgagaagtacaaccggagaggcgctccaccaggaggaggcaacaccgtccgaagcttccgtgcccggctggatgtgatcgaccagaagcctgtgtatttcttcaacttgacttccatgcaagactcagaaatgatcctcacagccaccttccacttctactcagaacctccacggtggccccgggctcgtgaggtattctgcaagccccgagctaagaatgcatcctgccggctcctgaccccaggtctgcctgctcgcttgcacctaatcttccgcagtctctcgcagaacactgccactcaggggctgctccgcggggccatggccctgacacctccaccacgtggcctctggcaggccaaggacatctcctcaatcatcaaggctgcccgaagggatggagaacttcttctctctgctcagctggattctggagagaaggatctcggagtgccacggcccagttcccacatgccctatatccttgtctatgcaaatgacctggccatctcggagcccaacagtgtagcagtgacgctacagagatacgacccatttccagctggagactttgagcctggagcagcccccaacagctcagcggatccccgcgtgcgcagggcggcacaggtatccaaacccctgcaagacaatgaacttccagggctggacgaaagaccagcgcctgccctgcacgcccagcatttccacaagcacgagttctggtccagtcctttccgggcactgaaaccccgcaccgggcgcaaagaccgcaagaagaaagaccaggatacattcaccccctcctcctcgcaggtgctggactttgatgagaagacgatgcagaaagccaggaggcggcagtgggatgagcctcgggtctgctccaggaggtacctgaaggtggattttgcagacatcgggtggaatgaatggatcatctcacccaaatcctttgatgcctactactgtgctggagcctgcgagttccccatgcccaagatcgtccgcccgtccaaccatgccaccatccagagcatcgtcagagctgtgggcattgtccctggcatcccggagccatgctgtgtcccagacaagatgaactcccttggagtccttttcctggacgagaatcggaatgtggttctgaaggtgtaccccaatatgtccgtagagacctgtgcctgtcggtaaggtggcttcaagatggaaggcagacctccttcacccctgctgtgcagagtggcattcttggagccaggatttgactcgagcaagtcccaggtgctagacggagcttatagacagccaggctgagaccaagatctgtccaccgagccacagttctcccgttcttccgcgtcgtggtagctctgtaaggacttttttgagttcctggaaggaatctggaattcaccatggtctgaaatttgcccacatttttcaaggcctagaaatagcatgtgtccacagatgtcaaccccaaggcatctgtcctctcagaacctggaaagactatgcaaatctcggggcactccccgccccccacggcagtaaatgcttatttgaaaaccctcaagcggcatactagaaacagggcctaaagcatggcatggatgggtatttctcttacatttcactacacatgcttttatacatgcagtacgcaacatgtactcgagactgatttcttcttttaatatatgtattttgatttcaaagcaaagtggacagagttgacccccatgccccacagacgtaatactgaaagttaggtgtgggctgtttaaacatgcgtatgaaaaataatacagtgatatgctggaatactaaaaaataaccaagattctatatttttgtaaattatactttgtatactgtagattgtgagtgttctgtgtttttatggaaagctaataaattaaaggtacagtg

SEQ ID NO: 3554 - DNA, 2989 bp, Rattus norvegicus
  Genbank Accession No. NM_024381
cgggccctccgctctccctgctccgccctccgcagccctccacagtcaccccggagaccagccctgttaagctctcggctctgaagctgactgatttccatggcagccgcgaagaaagcagttctggggccattggtgggagcagtggaccagggtaccagctcgacacgttttttggttttcaattcaaaaacagctgaacttcttagtcatcatcaagtagaaataaaacaggaattcccaagagaaggatgggtagaacaagatccgaaggaaatcctgcagtctgtttatgaatgtatagagaaaacatgtgagaaacttggacagctcaatattgatatttccaacatcaaagctattggtgtcagcaaccagagggaaaccacagtagtctgggacaagctaactggagagccgctctacaatgctgtggtgtggcttgacctaagaacccaatctactgttgagaaacttagtaaaagaattccgggaaataataattttgtcaagtccaagacaggccttccacttagcacttacttcagtgcagtgaaacttcgttggctcctcgacaatgtgaaaaaggtccaagaggctgtcgaagaaaatagagctctttttgggaccattgattcatggcttatttggagtttgacagggggaatcaatggcggtgttcactgtacagatgtaacaaatgcaagcaggacgatgctttttaacattcattctttggaatgggataaagagctctgcgaattttttggaattccaatggaaattcttcccaatgttcggagttcttctgagatctatggcctaatgaaagctggggccttggaaggtgtgccaatatctgggtgtttgggggaccagtctgctgctttggtgggacaaatgtgcttccaggatggacaggccaaaaacacgtatggaacagggtgcttcttactgtgtaacacgggccataagtgtgtattttctgaacatggccttttgacaactgtggcttataaacttggcagagacaaacctgtgtattatgcattagaaggttctgtagctatagctggtgctgtaatccgctggttaagagacaaccttggaattattaagtcctctgaagaaattgaaaaacttgctaaagaagtaggtacttcttatggctgctactttgttccagcattttcagcgttatatgcaccttattgggagcctagtgcaagagggatcatctgtggactcactcagttcaccaataaatgtcatatcgcttttgctgcattagaagctgtttgttttcaaacccgagagattttggatgccatgaaccgtgactgtggaatcccactcagccatttgcaggtagatggaggaatgaccagcaataaaattcttatgcagctacaagcagacattctgtatattccagtagtgaagccctccatgcccgagacaactgctctaggagctgccatggcagctggggctgcagagggggttggtgtctggagtcttgaacctgaggatttgtcagctgtcacaatggagcggttcgaacctcagatcaatgctgaagaaagtgaaatccgttactccacctggaagaaagctgtgatgaagtccattggttgggttacaactcaatctcctgaaagtggtatcccataaataataccacctcataggaatcccaagatgcaagccctttaacgtgatatgaaaatctgactattctgtctcataatctaatgatactattcatagactctgatttttgcccataaagcactcgctgcatgatcctccaagcagacctatgccttgaaacaaagaaaatgcagcagaaagatccctccagaaacatttaatattttttttgatattgacagttaagattgggtcagtgacctttgggactgacccctgcctccactctcatgatgccctatactattccccttaaggtctaggatgaatttgtatcctgtccattgaaatgtgtcatccagtatattccagatgctgctggcctaaacttgtctgaggaaggggttgttactcacctcttcaaaatgagtggattcctgcttgtttgcttttaacagctcagatgtcttttctacatattagaagaccacaacaccactggatatttcaatggaagcggtctaaagcattattggataataacttgctattcttgttgcttagacattttctgacagtgtttgcccaaattgaatttttcaggtgttttacactgtctcactaattgtcatggcttcatggctttctgtctggatcttacagggaagaagaaactttctttttctgctttttttttcattcctcctttttatatttttactctgtatgtataacatacatacctatatattttatatgctgagggtagcccatttttaaattaagagcacattatattcagtaagttccgaattatctcagctgggaggaaagtaactgtgggatgttacagtaaaaaatcttccccccacatgattctaaaccccaaaaaaatttttccttggaattatgttttccaaaattgagcccccattgggggagtaatcccaaccccaaactaagtaggaaaaaatgtgtggataaaacccataaaatcccccccattttattacccaataaaaagatggtcttaatttctgggatgaaaaaaaaataatctccactttatttcataactggcccaaaaaaaaactatcattgcaaatgcctcccagtgaaaccaataacttctcaaatatttagaattattggttataactcactaacctagtttcctaacatcaatttaaaatttgatttatagtaaagaaataagaaaatgatgcttctaattattttgttttgtccttttggaatggaaaatattgatatattaatagaaaaagttttatttggaattaatggtagattatatttcttattctgattgtgcccg

SEQ ID NO: 3555 - DNA, 2535 bp, Rattus norvegicus
  Genbank Accession No. NM_024392
gagcagtaccccggccactgccagtgtgtgcgtggtgcaggatagactcatggcttcgcctctgaggttcgacgggcgtgtggtcctggtcaccggcgccgggggagggttgggcagagcttatgccctggcttttgcagaaagaggagcattagttgttgtgaatgacttaggaggggacttcaaaggcgttgggaaaggctcttctgccgcagacaaggtcgtggaagaaataagaaggagaggcgggaaagcggtggccaattacgattcaggcgaagcaggcgagaagcttgtgaagacagcactggacacattcggcagaatagatgttgtggtgaacaatgctgggatcctgagggaccgttccttctctaggataagtgatgaagactgggatataattcaaagagttcatttgcggggctccttccaagtgacccgggcagcatgggatcatatgaagaagcagaattatggaagaatcattatgacggcctcagcttctggaatatacagcaactttggccaggcaaattatagtgctgcaaagctgggccttctgggtctcgccaatactctcgtgattgaaggcaggaagaacaacattcattgtaacaccattgccccaaacgctgggtcacggatgacagagacggtgatgccagaagacctcgttgaagccctgaagccagagtatgtggcaccgctggtcctttggctttgccatgagagctgtgaggaaaatggtggcttgtttgaggttggagcaggatggattggaaaattgcgctgggagaggaccctgggagccattgtcaggaagcggaatcagcccatgactcccgaggcagtgagggacaactgggtgaagatctgtgacttcagcaatgccagcaagccgaagagcattcaagagtccacaggtggtataatcgaagttttacataaaatagattcagaaggaatctcacaaaatcacaccggtcaagtggcatctgcagatgcatcaggatttgctggcgtcgttggccacaaacttccttcattttcttcttcatatacggaactgcagtgcattatgtatgccctcggagtaggagcttcagtcaaaaatccaaaggacttgaagtttgtttatgaagggagtgctgacttctcctgtttgcctacatttggagtcattgtcgctcagaagtccttgacgagtggaggcttagcagaggttcctgggctgtcaatcaactttgcaaaggttcttcatggggagcagtacttggagttgtataagccacttccccgatcaggggaattaaaatgtgaagcagttattgctgacatcctggataaaggctctggcatagtgattgttatggacgtctattcttattctggcaaggaacttatatgctataatcagttctctgtcttcgttgttggctctggaggctttggtggaaaacggacatcagaaaaactcaaagcagctgtagccgtaccggatcggcctccagatgctgtactgagagataccacttcactgaatcaggccgctctgtaccgcctcagtggagactcgaatcctttacacattgacccgagctttgcgagcattgccggttttgagaaacccatattacacggattatgtacttttgggttttctgcaaggcatgttttacagcagtttgcggataatgatgtgtcaagattcaaggccattaaggttcgttttgccaaaccagtgtatccaggacaaactctacaaactgagatgtggaaggaaggaaacagaattcattttcaaaccaaggtccaagagactggagacattgtcatttccaatgcatatgtggatcttgttcctacatctggagtttccgctcagacaccttctgagggtggagcactgcagagtgctcttgtatttggggaaataggtcgacgcctcaaggatgttggacgtgaggtggtaaagaaagtaaatgctgtatttgaatggcatatcacgaaaaatgggaatgttgcagccaagtggaccattgacctgaagaacggctctggagaggtttaccaaggccctgccaaaggctctgctgacacgaccatcacaatttctgatgaggatttcatggaagtggtcctgggcaagcttaacccacagaatgccttcttcagtggcagactgaaggcccgaggaaacatcatgctgagccagaagctacagatgattctgaaagactatgccaagctctgaaggacccactgcgtgctttaataaaaccagaatcattacgttctgtctacgcagtcatgctccagccttctttgaaacgatccacggtaatgtgcagcagaaatcgcttaacattttcagattcagataactttcagattttcattttctactaatttttcacatattatttttataaggaactgtaatctagctagcaaataattgttctgttcatagatctgtatcttaataaaaaaaaagtcaaccgaaaaaaaaaaaaaaaaaaaaaaaaaaaa

SEQ ID NO: 3556 - DNA, 2230 bp, Rattus norvegicus
  Genbank Accession No. NM_024394
gaattcgggcagaccctcggtctccaaagctacatagacacttggattcaagagggcacgagaaaagggggtcttggtgatcctcccagtacaccccagaaagccaggacacccctggcagcaccactccttcagggtcagccttagtgccctgtccaagagcactgctgtgaccacagggctgcaggtaccaggacaaaaggcctagttgctctcagagagccagtactgtcctaggcccagagctgattcgactctgaaactggggcaaggaagggtcaggatggacagtggggatggaagggggagctccccaaatgtccagggcagaagaacagcaagtctccatggagagagccacactgttcctttccgtgctgatagcccagggagaaggcagccggaggagggccacccaggcccacagcaccacccagcctgctctgctgaggctgtcagatcacctcctggctaactacaagaagggagtgcggcctgtgcgggactggaggaagcccaccctggtctccattgatgtcatcatgtatgccatcctcaacgtggatgagaagaaccaggttctgaccacctacatatggtaccggcagttctggaccgacgagtttctacagtggactcctgaggacttcgacaatgtcaccaaattgtccatccccaccgacagcatctgggtccctgacatcctcatcaatgagtttgtggacgtggggaagtctccaagcattccttatgtgtatgtgcaccatcaaggtgaagtccagaactacaagcccctacagctggtgaccgcctgtagccttgacatctataacttcccgttcgatgtgcagaactgctctctgaccttcaccagctggctgcataccatccaggacatcaacatttccctgtggcgaacaccagaagaagtgaggtcggacaagagcatcttcataaatcagggcgagtgggagctgctgggggtgttcaccaaatttcaggagttcagtatagaaaccagtaacagctatgcggaaatgaagttctacgtggtcatccgccggcggcctttattctacgcagtcagcctcttgctgcccagtatcttcctcatggtcgtggacattgtgggcttttgtctgcccccggacagtggtgagagagtgtctttcaagatcacgctccttctgggatactcagtctttctcatcatcgtgtcagacacactgcctgcaacggccatcggcactcccctcattggtgtctactttgtagtgtgcatggctctgctggtgataagcctcgctgagaccatcttcattgtgcagctggtgcataagcaggatttacagcgccctgtacctgactggctgaggcacctggtcctagacagaatagcctggctgctctgcctaggggagcagcccatggcccataggcccccagccaccttccaagccaacaagactgatgactgctcagccatgggaaaccactgcagccatgtcggaagccctcaggacttggagaagacctcgaggagcagagatagccctcttccaccaccaagggaggcctcgctggctgtgcgtggcctcttgcaagagctgtcctccatccgccactccctggagaagcgggatgagatgcgggaggtggcaagggactggttgcgggtgggatatgtgctggacaggctgctgtttcgcatctacctgctggccgtgctggcttacagcatcaccctggtcacgctctggtccatttggcattattcctgagtgggtacagcctggcagggaggggatgtgagtcctgcatcctgtttccaacaccaattcatctgagcaaccccagtccccttgtcccctaaacttagcactgaagacccggtcagaccccccgacttcgctatcatggctttaaagcatgatatcctagatcaagaggaaccaagactcctctaacttattaagacatcaagccctggttccttttccagtacttctgtgattatggcccttgggatggctcatttccacagtttttttttcctttttgatcagaggaaagcaaattctcttgcctaggtgcctgagacgtctgtgcctgttttatccaggccccagtggcttcttcttcagctcacttgtgggtacttccctagcgctcagcctcatcaaccaacggggggaggggataataaaatgctatgatatcccccgaattc

SEQ ID NO: 3557 - DNA, 2744 bp, Rattus norvegicus
  Genbank Accession No. NM_024398
acaaaatggcgccttacagcctactggtcacccggctgcagaaggccctgggtgtgcggcagtaccatgtggcctctgccctgtgccaacgggccaaggtggccatgagccactttgagcccagtgagtacatccgatatgacctgctagagaagaacattaacattgtccgtaaacggttgaaccggcctcttactctctcggagaagattgtgtatggacacctggatgacccagccaaccaggagatcgagcggggaaagacatacctgcgtttacggcccgaccgggtggccatgcaggatgcaacagcccagatggctatgctacagtttattagcagtgggctgcccaaggtggctgtgccatcaaccatccactgtgatcatctgattgaggcccagcttgggggtgagaaagacctacgccgggccaaggacataaaccaggaagtatataatttcctggcaactgccggtgccaagtatggtgtgggcttctggaggcctggatctggaatcattcaccagatcattctagaaaactatgcataccctggagttcttctgattggcactgactcccacacccccaatgggggtggcctgggaggtatctgcattggagtagggggtgctgatgctgtggatgtcatggctgggatcccctgggagccgaagtgtcccaaggtgattggcgtgaagctgacgggcaccctctctggttggacctcacccaaagatgtgatcctgaaagtggccggcatcctcacagtgaaaggtggcacaggtgccattgtggaataccatggacctggtgtcgactccatctcctgcactggcatggcaacaatttgcaacatgggtgcagaaattggggccactacaccagtgttcccctacaaccacaggatgaaaaagtacctgagcaagacaggccgagcagacattgccaacctagcagaagaattcaaggatcacttagtgcctgaccctggctgccagtatgaccaagtgattgaaattaacctcaatgagctaaagccacatatcaatggaccctttacccctgacttggctcacccagtggcagatgtgggcactgtggcagagaaggaagggtggcctctggacatcagagtaggtttgattggcagctgcaccaattcaagctacgaggacatgggacgatcagcagctgtggccaagcaagccctggcgcacggactcaagtgcaagtctcagttcaccatcaccccaggctctgagcagatccgagccactatcgagcgggatggctatgcacagatcctaagggatgtgggtggaatcgttttggccaatgcctgtggcccttgcatcggccagtgggacaggaaagacatcaagaagggggagaagaatacaatcgtcacctcctacaacaggaacttcacaggccgtaatgatgcaaatcctgagacccatgcctttgtcacatccccagagattgtcacagccctggccattgcgggaacccttaagttcaacccagaaactgacttcttaacaggcaaggatggcaagaagttcaagttggaggctccagatgcagatgagcttccccgatcggactttgatccagggcaggacacataccagcacccccctaaggacagcagtggccagcgggtggatgtgagccctaccagccagcgcctgcagctcctggaaccttttgacaaatgggatggcaaagacctagaggaccagcaaatccttatcaaggtcaaagggaagtgcactactgaccacatttctgctgccggcccctggctcaagttccgtgggcatctggataacatctctaataacctgcttatcggtgccatcaacatcgaaaatggcaaagccaattctgtgcgcaatgctgtcacccaggagtttggccctgtacctgacactgctcgctactacaagaaacatggcatcaggtgggtgatgattggagatgagaactacggtgaaggctcaagccgggagcacgcagcactggagcctcgccatctggggggccgagccatcatcaccaagagcttcgcaaggatccatgaaaccaatctaaagaagcagggcttgctgcccctcacctttgctgacccctctgactacaacaagattcatccagtggacaagctgaccattcaaggcctgaaggactttgcccctggcaagcctctgaactgcatcatcaagcaccccaatgggacccaggagaccatcctgctgaaccacactttcaacgagacacagatcgagtggttccgtgcaggcagcgccctcaacaggatgaaggagctgcagcagtgaggagccaggctggctcactgtcccactctggaccctgctggggcaaaggtgcaggcccatgtgcatccacagagcctcatctggtctgtccagcatgaccacctgctctaagatggtgaccagacctgcttcttgccctccctatcctcagcccactgagtgaaccaacatggagggcacttaagatgatggagggcacttaagatgatgtcccagccccgccttcctgttcagtttggtttgtctttgagcaacccatgcaactgtatttatttttgatgacagcactccctctacagaagtttttattctgcctaatcatttcactggtggctgaaggattttagagaaacttgttcttataaggaaaaaaaaaaaaaaaaaaaaaaaaaaaaa

SEQ ID NO: 3558 - DNA, 1173 bp, Rattus norvegicus
  Genbank Accession No. NM_024403
tcgagttaagcacattcctcgataccagcaaatccctacaacatgaccgagatgagcttcctgaacagcgaagtgttggcgggggacttaatgtcccccttcgaccagtcgggtttgggggctgaagaaagcctaggtctcttagatgactatctggaggtggccaagcacttcaaacctcatgggttctccagcgacaaggcgggctcctcagaatggctggctatggatgggttggtcagtgcctcagacaccggcaaggaggatgccttttccgggacagattggatgttggagaaaatggacctgaaagagtttgacttcgatgctctgtttcgaatggatgacctggaaaccatgccagatgagcttttggccacgttggatgacacatgtgatctttttgcccctctagtccaagagactaataaggagccccctcagacagtgaacccaattggccatctcccagaaagtgtaataaaagtcgaccaggctgccccctttacattcttgcagcctcttccctgttccccagggtttctgtcttccactccagatcattcctttagtttagagctgggaagtgaggttgatatctctgaaggagataggaagcctgactctgctgcttatattactctaacccctcagtgtgtaaaggaggaagacactccctctgatagtgacagtggcatctgtatgagccctgagtcctacctgggctctccccaacacagcccttccacctccagggccccaccagacagtctgccttctccaggtgttcctcgtggttctcgacccaaaccttatgacccacctggagttagtgtgacagctaaagtgaagactgaaaagttggataagaagctgaaaaagatggagcaaaacaagacagcagctactaggtaccgccagaagaagagggctgagcaggaagccctcactggcgagtgtaaagagctagaaaagaagaacgaggctctgaaagagaaggcagattctctcgccaaagagattcagtatctaaaagacctgatagaagaggtccgtaaggcaagggggaagaagagagttccttaatagggtagtcaggtgctttgtgcttgtacatagtcttgtgatgctgtgtttgctgtaataaattattttgtagtgaaagtaaaaaaa

SEQ ID NO: 3559 - DNA, 1240 bp, Rattus norvegicus
  Genbank Accession No. NM_024404
tcgcggcggcggcgggtgtcgtctcggcggcggcggaggcagtagcactatgtcggaggagcagttcggaggggacggggcggcggcggcggcaacggcggcggtaggcggctcggcgggcgagcaggagggagccatggtggcggcggcgcagggggcagcggcggcggcgggaagcgggagcggcggcggctctgcggccggaggcaccgaaggaggcagcaccgaggcagagggagcgaagatcgacgccagtaagaatgaggaggatgaaggccattcaaactcctccccacgacacactgaagcagcgacggcacagcgggaagaatggaaaatgtttataggaggccttagctgggacaccacaaagaaagacctgaaggactacttttccaaatttggggacgttgtagactgcactctgaagttagatcctatcacagggcgatcaaggggttttggctttgtgctatttaaagagtcggagagtgtagataaggtcatggatcagaaagaacataaattgaatgggaaagtcattgatcctaaaagggccaaagccatgaaaacaaaagagcccgtcaaaaaaatttttgttggtggcctttctccagacacacctgaagaaaaaataagagagtactttggtggttttggtgaggttgaatccatagagctgcctatggacaacaagaccaataagaggcgtgggttctgtttcattacctttaaggaagaggaaccagtgaagaagataatggagaagaaataccacaatgttggtcttagtaaatgtgaaataaaagtagccatgtcgaaggagcagtatcagcagcagcagcagtggggatctagaggagggtttgcaggaagagctcgcggaagaggcggtggccccagtcaaaactggaaccagggatatagtaactattggaaccaaggctatggcagctatggatataacagccaagggtacggtggttatggaggatatgactacactggttacaacagctactatggatatggtgactatagcaatcagcagagtggttatgggaaagtatccagacgaggtggtcatcaaaatagctacaaaccatactaaattattccatttgcaacttatccccaacaggtggtgaagcagtattttccaatttgaagattcatttgaaggtggctcctgccacctgctaatagcagttcaaactaaattttttctatcaagttcccg

SEQ ID NO: 3560 - DNA, 2939 bp, Rattus norvegicus
  Genbank Accession No. NM_024483
ggatccccgcagccgctggacgcacggagccccttcgctggccggtagcttacgctcgcgccggccgccccctcctccctctcgaccgcccctcctccgtcccgcccccgcgcggagtccccagcgctgcagaggccgccgcctgcactgccactccatgagccgccgctctcccggacacgcttgcagaggggagcagggagccggccccggcccttctttccttgtgactccgcagccaccgccggagtcggttccctcacaccaacgttcccattgggaccttcacggcccggtgacctctgtcctgctctacctgcagcactgctcccctgcagcccctctgccgcgggaacttgggcaggaccgacgggactggcacacggggctggctcgggcgctgcggcgatgcccgcgggctctctcccctccacttgctcgccctgtgcctgggctcgggccccgacctgcgccgtgagatgactttccgcgacatcctgagcgtcactttcgaaggaccccggtcgagcagtagcactgggggctccggcgcgggcggcggagctggcacggttggccccgagggtggggcggtgggcggcgtgccgggcgctacaggcggcggcgctgtggtgggaaccggcagcggcgaggacaaccagagctccacgggagaaccgggagccgcggcgagcggcgaagtaaatggctcggcggccgtcggggggctagtggtgagtgctcagggcgtgggagtgggtgtcttcctggcggccttcatcctcaccgctgtggcgggcaacctgctggtcatcctttcggtggcctgcaaccgccacctacagacggtcaccaactatttcatcgtgaacctggcggtggctgacctgcttttgagtgcagctgtgttgcccttctcagccactatggaggttctaggcttctgggccttcggccgaaccttctgcgacgtgtgggccgcggtggacgtgctgtgctgcactgcctccatccttagcctctgcaccatctctgtggaccggtacgtgggtgtgcgccactcgctcaagtacccagccattatgacagagcgcaaggccgctgccattctggctctgctttgggcggtggccctggtggtatctgtgggaccgctactaggttggaaggagccagtgcccccggatgagcgtttctgcggcatcaccgaggaggtgggctatgcaatcttctcttccgtgtgctccttctacctacccatggcagtgatcgtggtcatgtactgccgcgtgtacgtggtcgcacgcagcactacgcgcagcctcgaggcaggcatcaagagggagcccggcaaggcctccgaggtggttctgaggatccactgtcgcggcgcagcgaccagcgccaaaggatatcccggaacacagagtagcaagggccacaccttgcgcagctcgctttccgtgaggctgctcaagttttcccgcgagaaaaaggctgccaagacgttggccatcgtcgtgggtgtcttcgtcctgtgctggttccccttcttcttcgtcctgcctctgggctctctgttcccgcagctgaaaccgtcagagggtgtcttcaaggtcatcttctggctgggctacttcaatagctgtgtgaacccgctcatctacccctgctccagtcgcgagttcaagcgcgccttcctccgcctcctgcgctgccagtgtcgccgccgccgccgccgcctctgggcagtctacggccaccactggcgagcctcgaccggcgacgcgcgttccgactgcgcccccagccctcgcatcgctccccccggggcccctctagccctcactgcacacccgggtgcgggctcggcagacacgccggagacgcaggattcggtctccagcagtcgaaagccagcctccgccctccgggagtggagactgctcgggccgctacagagacccacgacccagctgcgtgcgaaggtgtccagcctgtcccataagattcgctctggggcccggcgcgcggagactgcgtgtgccctgcgctccgaggtagaagcagtgtccctaaatgttccccaagatggggcagaagctgtcatctgccaggcttatgagccgggcgactacagcaacctccgagagactgacatttaaggaccgaaactcaggctggggaaggtgctggggaaagtgcgggggccaggggtggggtgctttatgggatactgcttcggatccaagactgcccagggtggctgctccatctcacccagagcaaccggagctggacctgggggtcggagcacttcgaaggtgatgggttatggtgccgcctgctggacatagttgtccagagctcttcctgaaagggaaaggctacaggattcgcccttctcatccagtctaagaaactacttagtcaactcctagtgtctaagcagaaggcttcagctatggcttctccccttgggaggaagaggaagaggtacaaattcttgttttgctgctcccagggaaaagatccgtggacagtttctactccttactgccacctggaggaagtcaatggacctaccataggacctgccatccggcaagttttggtggcgtattggatgcccgccgaacaaatctgttgctcttccgctctgggcccactgccctcttccccacactcctaactgtatgttcccctcaccataccccccgccccgggccttactgtttacactgtgtacatagttcattgtgcctgtctgtgcccatcacttctcactgggattccaggctgccaaaggggagagccttatttatcattttgaaacctatttattggtaagagtacttatattttgttcagactgtgcaaactgtccatctttggcttgtaatgcatatagagcctccttcttctgaaatccttagacc

SEQ ID NO: 3561 - DNA, 2052 bp, Rattus norvegicus
  Genbank Accession No. NM_024484
cgggacactttgcagacatggagactgtcgttcgcagatgcccattcttatcccgagtccctcaggcctttctgcagaaggcagggaaatctctgctgttctatgctcaaaactgccccaagatgatggaagtcggggccaagccggctcctcggaccgtgtccacttcagcagcacagtgccagcaggtcaaagaaacccctccagccaatgagaaagagaaaactgccaaagccgcagtccagcaggctcctgacgagtcccagatggcacagactccagacggcacacagctcccgcctggacacccgtcaccctctacaagccagagctctgggagcaagtgccctttcctggcagcacagctagccagacgggcagcagcgtcttccgcaaggccagtctggagcttcaggaggacgtggcaggaaatgcatgctgtgaggacagaggttgctcaaagcccagtgctccccagcttggtcaatgcaaaaagggatggagaaggtccaagcccactgctgaagaacttccaggacatcatgagaaagcaaaggccagaaagagtgtctcatcttcttcaggataacttgcccaaagtcgtttccacttttcaatatgatcatttctttgagaagaaaattgacgagaaaaaaaatgaccacacctaccgagtttttaaaactgtgaaccggagagcacagatctttcccatggcagatgactacacggactccctcatcaccaataatcaggtgtcggtctggtcgagtaacgactatctaggcatgagtcgacacccacgggtgtgtggggccgtcatagagactgtgaaacagcatggtgccggtgcaggtggaactagaaatatttctggaacgagcaagttccatgtggaactggagcaggagctggctgacctccacggcaaggacgcggcgctcttgttctcttcctgcttcgtggccaacgactccactctcttcaccctggctaagatgatgccaggctgtgaaatttactctgattccgggaaccatgcctccatgatccaagggattcgcaacagtcgagtgccaaagtatatcttccgccacaatgatgtcaaccatctcagagaactgttgcagagatccgacccctcggtccccaagatcgtagcattcgaaactgtccattcaatggatggagcagtgtgccccctggaagagctgtgtgatgtggcccatgagtttggagcgatcacgtttgtggacgaggtccatgcagtagggctctatggggcttcaggtggagggatcggtgatcgggatggagtcatgccaaaaatggacatcatttctggaacactcggtaaagcgttcggctgtgttggaggatacattgccagcacgagtttgctgatcgacaccgtccggtcctacgctgcgggcttcatcttcaccacctccctgccaccaatgctgctggctggagccctggagtctgtgcggatcctgaagagcaatgagggacgtgcccttcgccgccagcaccagcgcaatgtcaagcttatgaggcagatgctaatggacgctggcctcccagtcatccactgccccagccacatcatccctgtgcgggttgccgatgctgctaaaaacacagaaatctgtgatgagttgatgaccaggcataatatctacgtccaggccattaattacccaacagtgcctcgtggggaggagctcctccggatcgcccccaccccgcaccacacaccgcagatgatgaactacttcctagagaagctgctgctcacgtggaagcgagtcgggctggaactgaagccacattcgtcagctgaatgcaacttctgcaggaggcccttacacttcgaagtgatgagcgagagagagaaagcctatttctcaggcatgagcaagatggtgtctgcccaggcctgactgtgactcagttattcacaaaccccagaccattaccatacccaaatagtagccagaattgtctttagatgtgaagtaaattatatattaaatcttaatctatagt

SEQ ID NO: 3562 - DNA, 845 bp, Rattus norvegicus
  Genbank Accession No. NM_030586
aggaagttagccgcagaatcccagatagcggccgagagggactcggatccaatggcgaccccagaggccagcggcagcggcaggaatggccagggctccgaccccgccgtcacctactaccggctggaggaggtggcgaagcgaaataccgcggaggagacgtggatggtgatccacgggcgagtctacgatatcacccgcttcctcagcgagcatcctggtggagaagaggttctactggaacaagctggtgccgatgcaactgaaagctttgaagatgtcggccactcccctgatgccagggagatgctaaagcagtactacattggtgatgtccatccgaatgaccttaaacctaaagatggtgacaaggacccttcaaaaaacaattcatgccaaagttcctgggcatattggattgtccccatcgtgggtgctattcttataggtttcctgtatcgtcacttctgggctgacagcaaatcctcctgaggagtccacgttgaagtgtcggagcacatctcctgggagtgagagggtggagacttgtgtggaggaggctgcagggtgctccttccttggatcctgccagttgttttctttccccttggagccaagatggttgaccagatatctatcctccttcaatgcaggaccagaatctgtccatcagcctgagcctgacgcccaaagcacctgctcacgttgtgtccttgtcagggtttcttctcactggttcccagtcattcccttcatttcaacagttgatgccaatgacttagagttcctttgttgtagtgacatttcctttggggacagtacatgatttctgatactttgaattc

SEQ ID NO: 3563 - DNA, 1595 bp, Rattus norvegicus
  Genbank Accession No. NM_030656
aggacaaacatcgatcagggtcaaattgacaataaaagggctggagcaagcaacagggactcaccaaccaggcctcgcctctgagttcagcccagagctagctgggaaatgttccggatgttggccaaggccagtgtgacgctgggctccagggcagcaagttgggtacggaacatgggctcgcaccagctgctggtgccacccccagaggccctgagcaagcccctgtcaattcctaagaggctcctgttgggtccgggaccctccaacctggctcctcgtgtgctagcagctggaagtctgaggatgattggccacatgcaaaaagagatgtttcagatcatggatgagatcaagcagggcatccagtatgtgttccagaccaggaaccccctcacactggttgtcagcggctcaggacattgtgccatggagactgccctgttcaacctcctggagcctggggactcctttcttgtgggaaccaatggcatctgggggatacgggctgcagagatcgctgagcggattggagcccgtgtgcaccagatgatcaagaagcctggagaacattacacactgcaggaggtggaggagggcctggctcagcataaaccagtgttgctgttcctgacccacggggagtcatccactggtgtgctgcagcccctggatggtttcggggagctctgccacaggtatcagtgcctactcctggtggactcggtggcatcattgggcggagtccctatctacatggaccaacaaggcatcgacatcttgtactctggctctcagaaggtcctgaatgccccaccagggatctccctcatctccttcaacgacaaggccaaatccaaagtctactcccggaagacaaagccagtctccttctacacagacatcacttatttgtccaagttgtggggctgtgagggcaagaccagagtaattcatcatacgttgcctgtcatcagcttatactgcctgagggagagcctagcactcatttcagagcagggcctggagaattcctggcggcgtcacagggaggctacagcacatctgcacaagtgcctgcgggagttgggcttaaagttctttgtgaaggacccggaaatccggctacctacaatcaccaccgtgaccgtgcctgccggctacaactggagggacatcgtcagctacgtgctggaccacttcaacattgaaatctctggtggtcttgggccctctgaggataaggtgctgcggattggcctcctgggctacaacgccaccacagagaatgcggaccgtgtagcggaggccctgagggaggccctgcaacattgtcctaagaataaattgtgagcatcgtctcaccagactgtgccctcctggaggggctgggaatatagcaggaacgagaagactgtgcaagccctccagccagcaaaggctgccgatgtaaccaggcgggaagggtcagggcgaagctgcccctctccccacagatggagccctgtggtcacatgatgctaatcaccttccgatgaagctgcattctgcaggccactggacttcgggaatattcaataaagtacttgccagac

SEQ ID NO: 3564 - DNA, 1539 bp, Rattus norvegicus
  Genbank Accession No. NM_030826
gaattccgcgctacaggcatttttgagtccaatatcttctacagtatgtctgctgctcggctctccgcggtggcacagtccaccgtgtatgccttctccgcgcgcccgctggcgggcggggagcccgtgagcctgggctccctgcggggcaaggtgctgctcattgagaatgtcgcgtccctctgaggcaccacgacccgggactacaccgaaatgaatgatctgcagaagcgtctggggcctcgtggcctggtggtgctcggtttcccgtgcaatcagttcggacatcaggagaatggcaagaatgaagagattctgaattccctcaagtatgtccgacccggtggtgggttcgagcccaactttacattgtttgagaagtgcgaggtgaatggtgagaaggctcacccgctctttaccttcctgcggaatgccttgccagcacccagtgacgatcccactgcgctcatgaccgaccccaagtacatcatttggtccccggtgtgccgcaacgacatttcctggaactttgagaagttcctggtaggtccagacggtgttccagtgcgcagatacagcaggcgctttcgcaccatcgacatcgaacccgatatagaagccctgctgtccaagcagcctagcaacccctaaggcattcctggtatctgggcttggtgatggctggctgccctccggggggaggtttttccatgacggtgtttcctctaaatttacatggagaaacacctgatttccagaaaaatcccctcagatgggcgctggtctcgtccattcccgatgcctttacgcctaaagaaaggcggtttcaccactaagaataaagtgctgcggaattccgtgtcttcctgggcacgtttttgtatgaatattcaagaaggcaccccgattactccgtgtccctgctgctgagacttgctaagaaatatgaagccacactggagaagtgctgtgctgaaggcgatcctcctgcctgctacggcacagtgcttgcagaatttcacctcttgtagaagaacctaagaacttggtcaaactaactgtgagctttacgagaagcttggagagtatggattccaaaacgcattctggtccgatacacccagaaagcaccctaggtgtcgaccccaactctcgtggaggcagcaagaaacctgggaagagtgggcaccaagtgttgtacccttcctgaagctcagagactgccctgtgtggaagactatctgtctgccatcctgaaccgtctgtgtgtgctgcatgagaagaccccagtgagcgagaaggctcaccaagtgctgtagtgggtccctggtggaaagacggccatgtttctctgctctgacagttgacgagacatatgtccccaaagagtttaaagctgagaccttcaccttccactctgatatctgcacactcccagacaaggagaagcagataaagaagcaaacggctctcgctgagctggtgaaacacaagcccaaggccacagaagatcagctgaagacggtgatgggtgacttc

SEQ ID NO: 3565 - DNA, 630 bp, Rattus norvegicus
  Genbank Accession No. NM_030833
cagaaccagggtagcagcagccatcctccagacggtgcgattgttccagagtcaataccatgagccacaattcccaagccttcttgcccgccaatgccgggcttcctccaagctatgagacaatcaaagaggagtacggggtgactgagctgggggaacccaacaactcagctgtcgtgaggaccaccgtgatcaacatgcccagagaggtctctgtgcctgaccatgtggtctggtccctgttcaatacgctcttcttcaatgcctgctgcctgggcttcattgcctatgcctactctgtgaagtccagggacaggaagatggtgggcgatgtgattggagcccaggcctacgcctccactgccaagtgcctgaacatcagctccctgatcttcagtgtcctcatggtcattatctgcatcatcattttctctaccacctctgcggtagtctttcagtcgctttcacaaagaacgccacattctggattctagctgccctgtgtcccacggtccacatctggccctccccctgcctgaggctgagggcttgaccctttaccctatgtgtatgcaaatgttaccttcgtatatctgtccacagtggagtcaataaagtacacttggtggc

SEQ ID NO: 3566 - DNA, 2335 bp, Rattus norvegicus
  Genbank Accession No. NM_030835
cggcacgaggccggcaccagctgtcggcacgaggttggactctttcctcccggtcctgcggccctctttctccggcgcgccgcccctcggttgctcagaccgctgtgatcggaggttgccggtgctccagcgcttggcgtcccggcccagtggccgtaggcggcgtaggcaccgcgagccgagcctcccggtggccggggaacggcaagcgagcgagtccgagaggttcttggggcaggtggcgccgcgaagatggtcgccaagcagaggatccgtatggccaacgagaagcacagcaagaacataactcagcgcggcaacgtcgctaagacctcgagaaatgcccccgaagaaaaggcgtcggtaggaccctggttattggccctcttcatttttgtcgtttgtggatctgcaattttccagattattcaaagtatcaggatgggcatgtgaagtgactgaccttgagatgtttccattctcctgtgaattttaacttgaactcattcctgatgttcgatgccctggttaaaaacaattcagtaaatcaccctgcctcagaatgactttttcatatcaaccttcatgtgtcattccaaggtttcttcaagagtcattccaggtttgctagtccatgccacagtgccttgcaaaagcaccacatgaataaagcaataaaatttgattattaagttccagtagtagaccatacttattcagtacagaatgagttttatgtggttattaaaacttatgactaattagattaaatctgtgtagacagggtatagattttgttaaccctaatgtgtaaatgcaattagctaatttaaattttggaaacttaaggttttatatagctaggcactttactactcttggattgaaaaagcacactccattatagggacatgtaactatcctataatcaggtgcttataaatggacaactacacggcctagttttaccacaatcattgtcacctaaatttttttaaaaactcctagggcatatgtaagtggagatgctcactgctgcatctgtttctaatgataatgtttctgttacacagccttgagtttcgcatgagtaagtatagtcacctagggatcccatttgagactgggttgagcattttggtaacttgaatccaaagtgactgcagtttcactaaaaagctatcatggtgagatgaaattaggggatggattgctgaaggtcatacagatcagaattaacatatcaaggggtttaccggtggaggaaaaaagttaagggggaaaagtctaccaagagggaaatgccttgaaaaaataggggggaaacctgtgtgccatatgatatcttagcatgtgaattgcacttttaataccaaaaaggcacatcaactaaaaagttatgattgaaatgcccttagggttctaggtatgtcaacctaaactagcatttggagttaaatgaatttactgataaggatcagtctagtcttcctctgtatgacttagtaggttgtgattggtcagatttccttttttaactaacggtaagggtgagagtgatgaggcagggtttgaggttttctggtactattgaaaactgcaagtcctgactatgcacttagccagaacttggtgtagaccaccaagcaatatctgtgtatggaattggaagaaacctgcttatgtttgctttgttatttgcctcaggagatctctttttgaaataagctgttttccaaaggaacagaagggaaacttgctacctgttctgagagcagtgtaaacctcacaggactttggaccccctcagatgtagaggagaatgaaggaaaggaatagttagggatgcacaggaatttatctgtctctgatcaggaaagaaagctggctatgggtctgcaggggcatgactgatggttgtctgcctcttttcaccctgtaagtgaatccctgaactggattcactgaagcaagtcttggttaactaattctattttactataactttaaaagtgaaaaatattctctaaatttatagcaggtgccttatttcctttgaatcaaatcattccataccagaatttcccttggtttactattagataattggctttaagatacttttgttttgaaacatacagtgttttaattgatttgttaaattgctgtagccatcaatcatttcacatttgtaaaatacattccctttgtatcatgtaatttgcctattcagtgcattttatattcaggttgggttatgcatatttgggtcaatgaaagttgtgtctgtttgatttatgctttaaaaataaagttccctggatatttaaaaaaa

SEQ ID NO: 3567 - DNA, 929 bp, Rattus norvegicus
  Genbank Accession No. NM_030845
cctaaaccagctccagcactccagactccagccacactccaacagagcaccatggtctcagccacccgctcgcttctctgtgcagcgctgcctgtgctggccaccagccgccaagccacaggggcgcccgtcgccaatgagctgcgctgtcagtgcctgcagacagtggcagggattcacttcaagaacatccagagtttgaaggtgatgccgccaggaccccactgcacccaaaccgaagtcatagccacactcaagaatggtcgcgaggcttgccttgaccctgaagcccccatggttcagaagattgtccaaaagatgctaaagggtgtccccaagtaatggagaaagaagatagattgcaccgatggcgtctgtctggtgaacgctggcttctgacaacactagttttacacattttacgatttctattgagggtcctatttattttatgtatttatttattccaccaagtgtgtggtttttattttacattaatatttaacgatgtggatgcgtttcatcgatggtcgttcaattccaattgtgcagtttaaagatggtaggcgttaaatatctcgttaaattaatatttattgggagaccattaggtgtcaaccactgtgctagaaggtgttgagcgggaagaagggcggagagatgagagtctgggatcgtgttttgtgttagggtgaggaatgtgtgagaggctatgttgtatgttttgaaagaatgttatttattgaaagttgtctttcatattttatggtcaacattgatgtgttgaagcttcccttggacattttatgtctagtttgtagggcacaatgccttttatattctttaaccaatgctccttctcgtctcaggacagagaagttcaaaggactgttacaaatgaaataaaaataaaagttttattaaaaaat

SEQ ID NO: 3568 - DNA, 2099 bp, Rattus norvegicus
  Genbank Accession No. NM_030846
aagctaggctgctctgctgcttctgcgatcgggcggcggcggggcgagccaagctgcggcgggggacggcggtctgggcagcgggcgccgcagtcagggagcagcagtgaggttggcggccgcgggcggcacacaaggcgggccaggccgggtgagggagcggacggcacgtcgcgggtggcattgtgtgtcccagtgtgcaagaatagccccagaagaggaaaggctgagcccagagcgcttcagcagggaagattcccttccccccgcttcaggctgctgagcactgagcggcgctcagaatggaagccatcgccaaatatgacttcaaagctactgctgacgatgagctgagcttcaagaggggggacatccttaaggttttgaatgaagagtgtgatcagaactggtataaggcagaactcaatgggaaagatggcttcatccccaagaattacatagaaatgaaaccacatccgtggttttttggcaaaatccccagagcaaaggcagaagaaatgcttagcaaacagcggcatgacggggccttcctgatccgagagagcgagagcgctcctggggatttctccctgtcagtcaagtttggaaatgatgtacagcacttcaaggtgcttcgtgacggagccgggaagtacttcctgtgggtggtgaagtttaattctttgaatgagctggtagattaccacagatcaacatccgtgtccaggaaccagcagatattcctccgggacatagaacaggtgccacaggaggatggtgagctgggctttcgccgaggagacttcattcatgtcatggataactcagatcccaattggtggaaaggggcctgccatgggcagaccggcatgtttccccgcaattatgtcaccccagtgaaccggaacgtctaagaagcaaaagagattatttaaagaaagtgaaaagttgagaccgttcacaagaattacacccacacgctgcctgtcacagcctgtgagggaacgcagaacacctggctgggtcccacgggcgaccctctcacttaagttgcaacttttgggggtgggaaggggtgtttgatttcataatgccaaaacttaacctattgaatgaattacagtttttattacggaatctcgccgctactcgtgttcccttcctgtgtccttttttcgcgttctttctttcctgtccagtgcatgatgtttaaggccacatatagtccagctgatgccaataataaaagaaaagaaaccaagtgggctggtattttctctatgcaaatgtctgtggagatggatggactagaggagccggattcttcacacacaggggcagccattgtatcggggcccttggttgggattcactggagatgcctaagggcatctgcctccggcctgaagcctggagcattccatcagagttggaattagggcaggagcctgctgcccacccatggtctcctgagagccagactgcagagctgccctccccactgcctcccttcagtgtctcacttgttttcatagtgcctttgtcttatttcaagggtgttcatgagtggtgtctttaccttttttatttttttaaataagttaaagatagtccagagcttttcagttgattagtctcctatcctatgtacatattttcctctcagggcaggagaaagaggacagagaaaggagctggcagaagcagagagggtgtatttcccatcttaaatgggccagaggtcttgaaggatcagcttttacattgtgagctttgacacctgcttcagctcagactcaccggccctcagagtccctgccctccaggtcccagttgccctttctatgcctagagccactaagggtcaaaacacaaggcaggcaggggggagcgggtggcatccttccctctcataggcctacaagcaggtggaagttgaaaattctggcctttaatttttcttgctcttacaattaagtcctcgttctcagttgcacatttccccccacctgtccacgagtacgaatggcaggattcgggggctggttcgatggttgcatctctgtgcacaacagtggtgtttcgacgtcgtctccgtc

SEQ ID NO: 3569 - DNA, 737 bp, Rattus norvegicus
  Genbank Accession No. NM_030847
cgaggacagactccaactctgacttcttcagcgactctcgagacttcccgaaccaagccgtctttcctcagaccttacagtcctcccagccttcctctctgacttagagagccagaccccagccctcttcccccaggattgagtgctccgacccttcgaaggcttgcctctcctgctctgagccagcatctggcagccatgtcactcctcctgttggtggtctctgcccttcacatcctcattcttgtcttgcttttcgtggccactctggacaagtcctggtggactctcccagagaaggagtccctgaacctgtggtatgactgcacgtggaacaccaccgctaaaacgtgggcctgcagtaacgtcagtgagaacggctggctgaaggcagtgcaggcgctcatggtgctgtctctcatcctctgctgtctgtccttcatcctcttcatgatccaactctacaccatgcggagaggagggctcttctacgccaccggcctctgccagctctgcaccagtgcggctgtgttctccggggcactgatctatgccatccatgctaaggagatcctggcaaagcacccgagtggaggcagcttcggctactgcttcgccctggcctgggtggcctttccactcgccctggtcagtggcatcatctacatccacctgcggaaacgagaatgagcgctgtgtccccctagaaaataaagccctgtaaccacaaaaaaaaa

SEQ ID NO: 3570 - DNA, 1312 bp, Rattus norvegicus
  Genbank Accession No. NM_030851
ggagctgccccaggacagaaacctcccaagacagcagtcaccatcaaaaacacaggtgaagctgtgagctctttgcttttctatccggaccacagctggatttgacctcctgtactgtgtcaacgtcaggtcactgtggatggcgtccgaggtcttgttggagctccagccctctaaccgaagcctgcaggcccctgccaacattacctcctgcgagagtgccctagaagactgggacctgctgtatcgggtgctgccagggttcgtcatcactatctgcttctttggcctcttggggaaccttttagtcttgtccttcttccttttgccttggcgacagtggtggtggcagcaacgacagaggcagcagcgcttaaccatagcggaaatctacctggctaacttggcggcttccgatctggtgtttgtcctgggcctgcccttctgggcagagaacatcgggaaccgtttcaactggcccttcggaactgacctctgccgggtggtcagcggggtcatcaaggccaacctgtttgtcagcatcttcctggtggtggctatcagtcaggaccgctacaggctcctggtataccccatgaccagctgggggtaccggcggcgacggcaagcccaagctacgtgcctgctcatctgggtagccgggggtctcttgagcatccccacattccttctacgctctgttaaagtcgtccccgatctgaacgtctctgcctgcatcctgcttttcccccacgaggcttggcactttgcaaggatggtggagttgaacgttttgggtttcctcctccccgtgactgctatcatcttcttcaactatcacatcctggcctccctgagaggacagaaggaggccagcaggactaggtgtgggggtcccaagggcagcaagacgacggggctgatcctcacactggtagcctccttcctggtctgctggtgcccttaccacttcttcgctttcctggatttcctggtccaggtaagagtgatccaggactgctcctggaaggagatcacagacctgggcctgcagctcgccaacttctttgcctttgtcaacagctgcttgaacccactgatttatgtcttcgcaggccggctccttaagaccagggttctggggactttataaatgatgcaaccgagaagcctcatgcccatgtggcccaacaggaagggactcttccaattatcctgctggaattcaaacagcagggagccaagaagcctggcttcttgaccaaccatctctggtatcataaagaccatctggtcagctgacccacagccc

SEQ ID NO: 3571 - DNA, 3112 bp, Rattus norvegicus
  Genbank Accession No. NM_030855
agttaacacgctagagtcatcccgccaaggtctgcgcgcgaaatctgtgggcgcgcaatttgggactttcgagtttgcgtctccgagcgagctagtgtggtgtcccgcaaagtgatttggagaggtacaactgatgaaaaaaaaagagcaagagaggaagggagagaattctgccaacatgcagagaagtattatgtcatttttccaacccacaacaacagaaggtaaagcgaagaagccagagaaggagatacccagcagcatcagagagaaggaaccccctccaaaggtggcattgaaggagaggaatcgagcagtgcctgagagtgattctccagtgaagaggccaggaaggaaggtggcccaggttctgagcagtgaaggggaggacgaagatgaagcccctggcaccccccaagtccaaaagcctgtgtcagactccaaacagagctctcctcccagccctgactcctgtcctgagaacagtcctgtcttcaactgcagcccctccatggacatctccccatcaggattcccaaagcgccgaactgcacggaagcagctcccaaaacggacaattcaagacactcttgaggagcccaatgaagacaaagccaaagcagttaagaaaaggaaaaaagaagatccccagaccccaccagaaagcctcacagaggctgaagaagtaaaccagaaggaagaacaggtggaggaccagcccacagtaccccctgagcccacagagtcccctgagtcagtaaccctcacaaagacagagaacattccaatgtgtaaggcaggtgtgaaacagaagcctcaggaagaagaacagagcaagcctcctgccagaggtgccaagccactgagcagtttcttcacaccccgaaaaccagcagtgaaaactgaagtcaaacaagaagagtcagacactccaaggaaggaagagaccaagggagccccggatccaaccaattataatccttccaagagtaactaccatcccattgaagatgcctgctggaaacatggccaaaaggttccttttcttgctgtggcccggacatttgagaagattgaggaggtgtctgctcggcttaagatggtggagacactgagcaacctgctgcgctccgtggtggccctgtccccaacagacctgctccctgttctctatctcagcctcaaccgccttgggccgcctcagcagggtctagaactgggcgttggtgatggtgtcctcctcaaggcagttgcccaggccacaggtcgtcagctggagtccatccgggctgaggtagctgagaagggggatgtggggctagtggcggagaacagccgaagcactcagaggctcatgctgccttcacctccacttactgtttctggagtctttaccaaattctgtgacattgcccggctcactggcagtgcttccatggccaagaaaatggacattatcaagggcctttttgttgcctgccgctactcagaagcccggtttattgccaggtccctaagtgggcggctgcgccttgggctggctgagcagtcagtactggctgctcttgcccaggctgggagcctcacaccccctggccaagaatttcccacggtggtggtggatgctgggaagggcaagacagcagaggccagaaagatgtggttggaagaacaaggcatgatcttgaagcaaaccttctgtgaggtgcctgatctggatcgcatcatccctgtgctgctggaacatggcttggaaagtctcccagagcactgcaagctgagcccaggggttcctcttaaaccaatgctggcccatcccactcggggtgtccgtgaggtcctgaaacgctttgaggaggtcgacttcacctgcgagtataaatactatgggcagcgggcacagatacatgttctggaaggtggagaagtgaagatctttagcaggaaccaggaagacaactcaggaaagtatcctgacatcatcagccgcatccccaagattaaacacccctcagtcacatctttcattctggacactgaggctgtggcctgggaccgggaaaagaagcagattcagccattccaagtgctcaccacacgcaagcgcaaggaggttgatgcatcggagatacaggtacaagtgtgtctgtatgcttttgacctcatctacctcaacggagagtccctggctcgccagcccctgtctcgacgccggcagctactccgtgagaactttgtggagacagagggtgagtttgtctttgccacctccttggacaccaaggacatcgagcagattgccgagttcttagagcagtcagtgaaggactcctgtgagggcctgatggtgaagaccctggatgttgatgctacctatgagatcgccaagaggtcacacaactggctcaagctgaagaaggactaccttgaaggtgtgggcgacactctagaccttgtggtgattggtgcctacctgggccgggggaagcggcctggccggtatgggggcttcctgttggctgcctacgatgaggagagtgaagagcttgcagccatatgcaagctgggaaccggattcagcgacgaggagctggaagaacatcatcagaacatgcaggcccttttattgcctaccccacgcccctatgtgaggattgatggggcagtggccccaaaccactggctggacccaagcattgtgtgggaggtgaagtgtgctgatcttaccctgtctcccatctaccgtgctgcacggggcatggtggacaaagaaaaagggatctcccttcgtttccctcggttcattcgtgtccgtgaggataagcagccagagcaggccactaccagtgaccaggtggcctctttgtaccggaagcagagtcagattcagaaccagcaaagctcagacttggactctgatgttgaagattactaacctcctgctctcctggagcctggggtggagattgagagaacatggttcactattggactggttgtgttgactggcgtgcaggtgcttacaggagtgagatcctggggctgggatgcttcattttattcaataaatgactatcatttgactacgaaaaaaaaaaaaaaaaaaaaaaaa

SEQ ID NO: 3572 - DNA, 2546 bp, Rattus norvegicus
  Genbank Accession No. NM_030861
ctccagggaagcaacagagagaagaaaagaaaggtacatggctacttcccactctcagcctagaagaataaacccttagattgcgggggaactgagccaggcaagccacaggcagccttgagcgcccccttgcctgccctcccctgcgggggccaggatgctgaagaagcagtctgcagggcttgtgctttggggtgctatcatctttgtgggctggaatgccctgctgctcctcttcttctggacacgcccagcacctggcaggctgccctcagacagtgcccttggtgatgaccctgccagcctcacccgtgaggtcatccacctggccgaggacgccgaggcggagttggagcggcagcggggactactgcagcagatcaaggagcattattctctgtggaggcagaggtggagagttcccaccgtggcccctccagcctggccccgtgtgcctgggaccccctcaccagctgtgatccccattctggtcattgcctgtgaccgcagcactgtccggcgctgcctggataagttgttgcactatcggccctctgctgagcatttccccattattgtcagtcaagactgtgggcatgaagagacagcacaggtcattgcttcttatggcaccgctgtcacacacatccggcagccagacctgagtaacattgccgtgcagccagaccaccgtaagttccagggttactacaagattgccaggcactaccgctgggcgctaggccagatcttcaacaagttcaagttcccggctgctgtggtagtggaggatgatctggaagtggcgccggacttcttcgagtacttccaggccacctacccgctgctgaaagcagacccctccctttggtgtgtgtcggcttggaatgataatggtaaggagcagatggtggactccagcaaacctgagctgctctatcgaacagacttttttcctggccttggatggctgctgttggctgatctctgggcagaactagagcccaagtggcccaaggccttctgggacgactggatgcgcagacctgagcagcggaaggggcgggcttgtattcgtccagaaatttcaagaactatgacatttggtcgcaagggtgtgagccatgggcagttctttgaccagcatcttaaattcatcaagctgaaccagcagttcgtgcccttcacccagttggacctgtcgtacctgcagcgggaggcctatgaccgggacttccttgcccaggtctatggtgccccccagctgcaggtggagaaagtgaggaccaatgatcggaaggaactgggggaggtgcgggtacagtacactagcagagacagctttaaggcctttgctaaggccctgggtgtcatggacgacctcaagtctggtgtccccagagctggctaccgtggcattgtcactttccagttccggggtcggcgtgtccacctggcacccccagagacatggaatggctatgatcctagctggaattagtggcacctgcctttccctcctgggtctccttgccgtatgatgagccgaggcagcctgcaggccctgggctataccattctgccagtgtttcctcttggatctatagatcttccctttttgtcctggccttcccccaagtggcattctagtgcacaaatcataagatgagggttatactcctcttgtcaagggagtactgtgtggtatgttcggggcatattgaacaagaaaccactgtgtggtgtggggagggttggacctgttggaccaggcttgtagtgtcctgagttctctccaagggcatctgcggagagcttggccactccagctctcctgaccaggcctctccaccctgatctggctcctgttagtacatgagcccactttatgtaccttccccactttctccaccttccccagggtggggccggattatggaagaaggaatagatttgtggccaactgagactaaccaaagggattcactgtcagagttagattgcatggccgggttgccggggtcactgcctcctggcttctcttcctgccgactttgccagtgctcttcttgtcctgcagtggagcagtgtgttgtgagatggaaagtaggagctaaagcaagacctctcccgtggtggagcagttgtcaggaacaatgacaggcggaaagcctacacttgggcacccctcttcttgcccatggccccccacttctgaaagttagttccctttgcattctttagggggattcagtggcagcctagtgggggacagtgggctccacgcctctttcccctggggttggtacagcctcctcccacagggcttgttcctggtggccatctcagcaaagtcaccagcagctgagaccaggacacctgtggcccttcctaagcattcccacatcttcccaggccgaggggcaggtggcaggctagagagaaagaaatttgtgtgttttgtttgttgcctgatcttagtttcatggaagaaaatggaatctacagaattattttcaaaaataaagtaaaggctgaattgtctg

SEQ ID NO: 3573 - DNA, 1450 bp, Rattus norvegicus
  Genbank Accession No. NM_030985
cggggactggatgatgctgtcccgctggagaggattcgtggcttgagtcctgttccacccgatcaccggggtggccgaggcggtaccagcgctgcgctctctcagctcctgccacattccctgagttaacatatgagagattggtatagaaatggctggcattttgtctggataaatcacacaaccctcccagaaagtgatcaccaggtcaagtggatttcgaatagtgtctgagaccaactcaacccagaaaaacaaaatggcccttaactcttctgctgaagatggtatcaaaagaatccaagatgactgccccaaggctggcaggcacagttacatatttgtcatgatccctaccctctacagcatcatctttgtggtgggaatatttggaaacagcttggtggtgattgtcatttacttttacatgaagctgaagactgtggccagcgtctttcttctcaatctcgccttggctgacttatgctttttgctgacttgtcccctgtgggcagtctataccgctatggagtaccgctggcccttcggcaatcacctatgtaagatcgcttcggccagcgtgacgttcaacctctacgccagtgtgttccttctcacgtgtctcagcatcgaccgctacctggccatcgtccacccaatgaagtctcgccttcgccgcacgatgctggtggccaaagtcacctgcatcatcatctggctgatggctggcttggccagtttgccagctgtcatccaccgaaatgtatacttcatcgagaacaccaatatcacagtgtgcgcgtttcattatgagtctcggaattcgacgctccccatagggctgggccttaccaagaatattctgggcttcttgttccctttccttatcattctcaccagctatacccttatttggaaagctctaaagaaggcttatgaaattcaaaagaacaaaccaagaaacgatgacatctttaggataattatggcgattgtgcttttcttcttcttttcctgggtcccccaccaaatattcactttcctggatgtgctgattcagctgggcgtcatccatgactgtaaaatttctgacatcgtggacactgccatgcccatcaccatctgcatagcgtattttaacaactgcctgaaccctctgttctacggctttctggggaagaaatttaaaaagtatttcctccagctcctgaaatatattcccccaaaggccaagtcccactcaagcctgtctacgaaaatgagcacgctttcttaccggccttcggataacatgagctcatcggccaaaaagcctgcgtcttgttttgaggtggagtgacaggttcaaagcacactggcaatgtaatgccctgacagaagccagggagcctctgactaaatggcttacgaccaaaggaccattcaccctgcctcaggatctaagcagaaa

SEQ ID NO: 3574 - DNA, 889 bp, Rattus norvegicus
  Genbank Accession No. NM_030986
ggtggctggtggagtgaagctttggtagacatggctcccaacgcgttggctcctgaaccggagcatcccgaaggcatccgggccgtgttgctggggcctcccggggctggcaaggggacccaggcacccaaattggctgagaatttctgtgtctgtcacttggccactggggacatgctgagagcgatggtagcttcaggctcggagctggggaaaaagctgaaggcgacaatggatgccggaaaactggtgagtgatgaaatggtcgtggagctcattgagaagaatttggagactccttcctgcaaaaatggctttcttctagatggcttccctcggactgtgaagcaggctgaaatgcttgatgacctcatggataagaggaaagagaagctcgattcagtcatcgagttcagcatccaggactccctgctgatccggagaatcacgggaaggctgattcaccccaagagtggccggtcctaccatgaggagttcaaccctccaaaggaggccatgaaagatgatatcactggggagcccctgatccgcaggtcagatgacaacgagaaagccttgaagacccgcctggaggcctaccacactcagaccactccgcttgtggaatactacaggaaacggggcattcactgcgccattgatgcgtcccagacccctgacgtggtgtttgcaagcatcctggcagccttctccaaagccacatgtaaagacttggtcatgtttgtctaatgttgggtttgaagggcctcttttcttcctctctgtgaaaggaatggagggtggtcatggttaggtaggtagaaggaacttcctttctcagacagcaaggrcaccttctaatgtactgattaagcacttacttgaaaaa

SEQ ID NO: 3575 - DNA, 2837 bp, Rattus norvegicus
  Genbank Accession No. NM_030987
gaattcggcacgaggtggaaagcactgagacgtgaagatgagtgaacttgaccagctgcggcaggaggccgagcaactgaagaaccaaattagagatgcccgtaaagcatgtgcagatgcgactctttctcagatcacaaacaacattgatccagtgggaagaatccaaatgcgaaccaggagaacactgagggggcatctggcaaagatttatgccatgcactggggcacagactcaaggctccttgtcagcgcctctcaggatgggaaactcatcatctgggacagctataccacaaacaaggttcatgccatccctctgcgctcctcttgggtcatgacctgtgcatacgctccttctgggaattatgtggcctgtggtggcctggataacatctgctccatttacaatctgaaaactcgtgaaggaaatgtgcgtgtgagtcgtgagctggcaggacatacaggttatctatcctgttgccggttcctggatgacaatcagatagttaccagttctggagacaccacatgtgccctgtgggacatcgagaccggccagcagacaaccacgtttactggacacactggagatgtcatgagcctgtctcttgctcctgacaccagactgtttgtctctggtgcttgcgatgcttcggtcaagctctgggatgtccgagaagggatgtgccggcagacctttacaggacacgagtctgacatcaatgccatatgtttctttcccaatggcaatgcctttgccactggctcagacgatgctacatgcaggctgtttgaccttcgtgcagaccaggagctcatgacctactcccatgacaacattatctgtggtatcacatctgttcccttctccaagagtggccgcctcctcctcggtggctatgacgacttcaactgtaatgtctgggatgcactcaatgctgacagagcaggtgtcctagctggacatgacaaccgagtcagctgcttgggggtgactgatgatggcatggctgtggcaacaggatcctgggacagcttcctcaagatctggaactaaggccacagcaggtggatggatgccatggcgactggaagaccattccaaccttgaagcgttactgcgatagcatatcctatccaaccatactaacgtggacacccacacctcccctcagaacttcaaaagggcaagatcttttttccttcacttattgctgaaaccaagagcacaactcccattaagagaaggatctctgtgctgtaaactaaaacaaattgtgcatttttctggggccattgtctttggtttattttgttttgttttttgtttttgttttgtttgtcttgggcaaatttttaaaggaaatactacaataaaaatgttaaccagaaggtaaccctgagtatgattgtgagagagacacaccttcttactagttcatttgcatttaaatcagtgatcctgatctgtggcaatcatgaaaaacaagttgaagactttgtttatctggaattgtttctaaatataagtcatttgtagcaagactttggaagcattcacgtttcttccttaaacatattcctttatgttcagtagttaagagaaccagagcccatgggggtgtctgactgtcactgatgcatttttgtccctggcttgcttttttttttttttttttttttttgtctcatgtcacagatgactgtttcgcacaaacacagcatagtggaagaaaaaattcagaagcaaagtagccaagcacatgttatgatggccacgaatgcttggtcagaatccttccctttgctcagcagtgaacttattcccagcacccttccctcctcactgtccagtttctgttctttccttgggtttcctgtgaagttggagggaagtttgtagtcatgtgacactagccgtcctgcccctgctgtcagattttttttctccagagaggtgcctgtcctgtgcttggatagtcagtttgtgtatgaaacaatgtacaaatcaatgttttgaaaataatgatctcagactttctaagttaaattttaaacaatttgattgtttgccatattgggtgggtttactcttagaatcgcatgctgtagaaatgctctaaagtgcatataggactcagtccttagatgttctttttattttaagaaataacctcttcaagttgtaaccgtggcggctttgtccattactgttgctattctgcacacatatcggaagcagcaagcgctttacacactcgagtagtgggataagtcactgttttctttactttacaagatgatagtcctgttgggaatgactgctgctggcttcaggaagggagggaagctgctccgctgcctctttgccacttcctggaagcagcctccatggaacagcctttgcatctgaggcaaccatttttacaccgtgcagatcttcgtggttatcatctcaaagccatgttcagcagcagcgtttggacagcagtgttctgtgggccctcccatcccccgatatcctgcacccctcatagcagtagtggcttcgccattctgttttctgcagcgtcctgtacaaaactgtgctgtgactgtgcggtaggcctggacatggcaaagagaatacagcgaagccccttctcttcctaccaaacgactctgtagagctctctgcaccctgtaccctttccaccttttgtatttaattttaaagtcagtgtactgcaaggaggctggatgcaagatagatactatattaaactgtactgttatttaagatgtaataaagcagtttgacatgaggaaaaaaaaaaaaaaaaaaaaaaaaaaaa

SEQ ID NO: 3576 - DNA, 1786 bp, Rattus norvegicus
  Genbank Accession No. NM_030989
gggtctgctgggattgggactttcccctcccacgtgctcacactggctaaagttctgaagctccagttcattgggactttccttgctataggtagcgactacagttagggggtacctggcatccgggcccgcaccctacttcccagcagggtgtcacgctcccctgaagactggataactgtcatggaggattcacagtcggatatgagcatcgagctccctctgagtcaggagacattttcatgcttatggaaacttcttcctccagatgatattctgcccaccacagcgacagggtcacctaattccatggaagatctgttcctgccccaggatgttgcagagttgttagaaggcccagaggaagccctccaagtgtcagctcctgcagcacaggaacctggaactgaggcccctgcacccgtggcccctgcttcagctacaccgtggcctctgtcatcttccgtcccttctcaaaaaacttaccaaggcaactatggcttccacctgggcttcctgcagtcagggacagccaagtctgttatgtgcacgtactcaatttccctcaataagctgttctgccagctggcgaagacatgccctgtgcagttgtgggtcacctccacacctccacctggtacccgtgtccgtgccatggccatctacaagaagtcacaacacatgactgaggtcgtgagacgctggccccaccatgagcgttgctctgatggtgacggcctggctcctccccaacatcttatccgggtggaaggaaatccgtatgctgagtatctggacgacaggcagacttttcggcacagcgtggtggtaccgtatgagccacctgaggtcggctccgactataccactatccactacaagtacatgtgcaacagctcctgcatggggggcatgaaccgccggcccatccttaccatcatcacgctggaagactccagtgggaatcttctgggacgggacagctttgaggttcgtgtttgtgcctgtcctgggagagaccgtcggacagaggaagaaaatttccgcaaaaaagaagagcattgcccggagctgcccccagggagtgcaaagagagcactgcccaccagcacaagctcctctccccagcaaaagaaaaaaccactcgatggagaatatttcacccttaagatccgtgggcgtgagcgcttcgagatgttccgagagctgaatgaggccttggaattaaaggatgcccgtgctgccgaggagtcaggagacagcagggctcactccagctacccgaagaccaagaagggccagtctacgtcccgccataaaaaaccaatgatcaagaaagtggggcctgactcagactgacagcctctgcatcctgtccccatcaccagcctccccgtcccctcctttcttgccattttatgactttagggcttgttatgagagctgacaagacaatgctagtcccttcactgcctttttttaccttgtagatagtactcggccccctctatgcaaactggttcctggcccagattggggaatgggttggtagttgctgggtctctgctggtccagcgaaatcctatccggtcagttgttggacctggcacctacagtgaaatttcaccccaccccaccgcctgtaagattctatcttgggccctcatacgatctgtatcctccggacccatttcctccactctgcaaagcctgtctgcatttatccatcccccacccctctccctctttttatctctttttatatatccaatttcttattttacaa

SEQ ID NO: 3577 - DNA, 3019 bp, Rattus norvegicus
  Genbank Accession No. NM_030990
agagagaaaaagtaaaggacagaagaaggagactggagagaccaggatccttccagctgaacaaagtcagccgcaaaacagactagccagcaggctgcaattggagccagagtgccaaagacatgggtttgttagagtgctgtgctagatgtctggtaggggccccctttgcttccctggtggccactggattgtgtttctttggagtggcactgttctgtggatgtggacatgaagctctcactggtacagaaaagttaattgagacctatttctccaaaaactaccaggactatgagtatctcattaatgtgattcatgctttccagtatgtcatctatggaactgcctctttcttcttcctttatggggccctcctgctggccgagggcttctacaccaccggcgctgtcaggcagatctttggcgactacaagaccaccatctgcggcaagggcctgagcgcaacggtaacagggggccagaaggggaggggttccagaggccaacatcaagctcattctttggagcgggtgtgtcattgtttgggaaaatggctaggacatcccgacaagtttgtgggcatcacctatgccctgactgttgtatggctcctggtgtttgcctgctctgctgtgcctgtgtacatttacttcaatacctggaccacctgccagtctattgccttccctagcaagacctctgccagtataggcagtctctgcgctgatgccagaatgtatggtgttctcccatggaatgcttttcctggcaaggtttgtggctccaaccttctgtccatctgcaaaacagccgagttccaaatgaccttccacctgtttattgctgcatttgtgggtgctgcagccacactagtttccctgctcaccttcatgattgctgccacttacaactttgccgtccttaaactcatgggccgaggcaccaagttctgatctcccatagaaatccccctttgtctaatagcgaggctctaaccacacagcctatagtgttgtgtctcctgtcttaactctgcctttgccactgattggccctcttcttacttgatgagtataacaagaaaggagagtattgcagtgattaatctctctctgtggactctccctcttatgtacctctttcagtcattttgctccacagtgggctcctgctagaaatggggaatacctgagaaggtgattcccccgctgcaagtcgcagaggaatgaaagctctaattgagtttgcaagcatctcctgaaggccaggatgtgcttccttctcaaagggcacttccattgaggaaaacaaagtggaaagaaagattctcaggtagaaagcaggaatgtccttggtctccttgccatcagtaggagtcaaatatattctctttgatgcacaaaaccaagaactcactcttttcttcctagttccactgaagacagaaggaaataagcaatagcatttgcccaaatctgcctcctgcagctaggagaagggggtcaaagcaaggatctttcacccttagaaagagagctctgacgccagtggcaatggactatttaagccctaactcagccaaccttccttacagcattagggagcacagtgtctatttagacaaagtggggcctggaggaggggggcctcatctgtccttacagctcattaggaagagaaacagagtgttgtcaggatcgactcactcccttctccctgataacagctaccatgacaaccttgtggtttccaaggagctgagaatagaagggaactagcttatataaaataagactgtgacctaaggagcatcagttgggggatgctaaaggtgtaaattgagatgccctctggcagatgcaaaacacttaactctttggatagcatctccccccaccccatcagttgtgtcctcttggcctctggcacaatatcttcacaatggtgctcttttccttgggttttatccattcacttacagcaggtgattagaggattttgattagtttcagaatgactcctgtttcatatttcccagttgtttatctcttgtttggagctgtaccagaaagaactggagaatgattctttgagcttagttctttttcaaaagaaaaaagaaaaactggacagtaagcatcacaaaaatatttgaaattgtgtagtcccatgaaatgattgggattttccccaagtattctaccttttgtagaactaggcttggtaaatttgaacctccatttgaataacctgtccaatattttcttttctaataaatgacagatgattttgcttgctaatattatctcagcattttgaaagtttaggcttagcatagaggttattgtgtcttggtatatataggtcacataatagatttcagcaactgccagctgtttagttggtgagcttccagagagctctggagacatggtgaggacagacagaattggaaacctgaagaactcccagatttcaggcttatcctgtacttgttaactttgggtgaaagaaagaaaagcaaagaaagaaaggaaaagcctctgatctgtttttactgaaggaaaagttactgtagattttttttttttgtagatttgtgctgtcattccccaaagtgcttttgtcatgttgaaagagatataaggatttagaagaagatacttgagacttgttcttgggccagtatataaggtaaactagcaggatgcacagtagtgaggagagcttaaaggacctggaagaaaccaatcaagataaaggaaggtgaaataatctatatcttttatttggtttgattttaatatcataacagataaccaaccactccctgaaaacctcacacgtatatatacacacacgcatgcacatacaaagagagttaatcaactgcaagtgtttccttcatttctgatatagaattttgattttaacaacataaaggataaactcttagaaactcatcttacaaaatgtattttataaaattaaagaaaataaaattaagaatgttctc

SEQ ID NO: 3578 - DNA, 2100 bp, Rattus norvegicus
  Genbank Accession No. NM_030991
aattcggcacgagcagagctcacgttgcattgaagacgaaacctcggggaggtctggagctgtctttccttccctccctacccggcggctcctccactcttgctacctgcagggatcagcggacagcatcctctgaagaagacaaggttccttaactaagcaccactgacttgctggccccggcgcccagcaaccccccaccactaccatggccgaggacgcagacatgcgtaatgaactggaggagatgcagaggagggctgaccagctggctgatgagtccctggaaagcacccgtcgcatgctgcagctggtcgaagagagtaaagatgctggcatcaggactttggttatgttggatgagcaaggcgaacaactggaacgcattgaggaagggatggaccaaatcaataaggatatgaaagaagcagaaaagaatttgacggacctaggaaaattctgcgggctttgtgtgtgtccctgtaacaagcttaaatccagtgatgcttacaaaaaagcctggggcaataatcaggatggagtagtggccagccagcctgcccgtgtggtggatgaacgggagcagatggccatcagtggtggcttcatccgcagggtaacaaacgatgcccgggaaaatgaaatggatgaaaacctagagcaggtgagcggcatcatcggaaacctccgtcatatggccctagacatgggcaatgagattgacacccagaatcgccagattgacaggatcatggagaaggctgactccaacaaaaccagaattgatgaagccaaccaacgtgcaacaaagatgctgggaagtggttaaatctgcccttctgctgtgctctcctccaatgttgttggacaagagagaagagagctccttcatgcttctctcatggtattacctagtaagacttacacacacacacacacacacacacacacacacacacacacacacacacacacacacagagtcagtcacccccattgtaaatgtcctgtgtggtttgtcagcttcccaatgataccatgtgtcttttgttttctccggctctctttctttccaaaggttgtacatagtggtcatctggtgactctatttcctgacttaagatcttgggtctctctcttttttcctttttcttttctcagtggcgtttgctgaatgacaacaatttaggaatgctcaatgtactgttgatttttctcaatacacagtattgttcttgtaaaactgtgacattccacagagctactaccacagtcctttcttagggtgtcaggctctgaatctctccaaatgtgctgtctttggttcctcatggctattctttgtctttatgatttcataattagacaatgtgaaattacataacaggcattgcactaaaagtgatgtgatttatgcatttatgcatgagaactaaatagacttttagattcctacttaaacaaaaactttccatgacagtagcatactgacaagaaaacacacacaacagcaacaataacaaagcaacaactacgcatgctcagtattgggacactgtcaagattaagtcataccagcaaaacctgcagctgtgtcaccttcttctgtcaacatacagactgatcataatcatcccttctttacacacacacacacacacacacacacacacacacacacaaatggatttaacacaccattaatcatttctagcaaaatatatgtttggctgaaactatgtgaaatgggtgtaatatagggtttgtcgaatgcttttgaaagctctgttttggagacaatactcttgtggaaaacgtgaagatcttctaagtctggctcttgttgatcaccatctccctgtggtttgtcatcagtacaactctttgttgcttaatctagagctatgcacaaccaaattgctgagatgtttagatgctgataaagaaacctttaaaaaattatataaatgaatgaaatatagataaactgtgagataaatatcattacagcatgtatattaaatccctcctgtctcctctgttggtttgtgaagtgatttgacattttgtagctagtttaaaattattaaaaattataga

SEQ ID NO: 3579 - DNA, 1590 bp, Rattus norvegicus
  Genbank Accession No. NM_030996
acgcgtccgacgttggtggtaccaggctgcccgctgggatgccgtgggctgtgggccggcggtgggcatggatcaccctgtttctgactattgtggcggtgctgatccaggcggtctggctgtggctgggtactcagagcttcgtcttccagagagaagagatagctcagcttgctcgacagtacgcagggctggaccatgagctggccttctctcggctgatcgtggagctgcggaggctgcacccaggccacgtgctgccggatgaggagctgcagtgggtgtttgtgaacgcgggcggctggatgggcgccatgtgtcttttgcacgcctcgctgtctgagtacgtgctgctcttcggcaccgccctgggctcccatggccattcgggacgatactgggctgagatttcagataccatcatctctggcactttccaccagtggagagagggcaccacaaaaagtgaggtctattacccaggagagacggttgtccatggacctggagaggcaacagatgtggagtggggaccaaacacgtggatggtggagtatggccggggtgttattccgtctaccctggcatttgcacttagtgacactattttcagcacccaggacttcctcaccctcttctatacccttcgcgcctatgcccggggcctccggcttgagctcaccacctacctctttggccaagacccctgaccagacaggctgaaggaagacctgcgagtggacaggagcgggcaggaccacatccatttctctactcgctgggactcatgttcactgacagcagcatataccatgcagataattaagttcctgctgtgtgaggaaggacatacatacacatacatccagacacagctcttggggagcaatgagacgcagagatgctaagacttgtatgtactgtaagatcatgcactcacctccatccagagagggtccccgacgtatactccaggggggcgcccagtcatgtttgaacacataccacgagcttgactcacctgactcaggcttttccagagcctcctgctggcattcggggctctgagatagaggattggggtagatgacacagtctgcctcgccctcgctctgatgccgcattccagtagtgatctctggtgaaggaaaagaggagctgcccttcggaggtcccgttcgcctgcagctgtgatgcccttccctccatccctttcctcaccatatgccttatctccattccagtcccctgctatgcaagtgtccctgtggcttgtcctccatgcccccagcgaccagctgggaaagcagaggaatgtagaggaagctgaaggactgaaggaaggaggttctccaccatggagaccctcagggttacaatgggaaagctggctgatgcctggggccagttcccaaagagaggacctggggaagtgagcctggctccgagaagccaccccattccaaaagaagcctttagtgtatgtgtgcacaccttgtcggtctccagacatttctgttgcattctctgtcttcctgtctctctctgttaataaaaacagatcaaacagtaaaaaaaaaaaaaaaaaaa

SEQ ID NO: 3580 - DNA, 1124 bp, Rattus norvegicus
  Genbank Accession No. NM_031000
gaattctggccactttgtcttctccacagcctgtgctcattgccaaggggacaatgacggcctccagtgtcctcctgcacactggacagaagatgcctctgattggtctggggacatggaagagtgagcctggtcaggtgaaagcagctattaaatatgcccttagcgtaggctaccgccacattgactgtgcttctgtatatggcaatgaaactgagattggagaggccctgaaggagagtgtgggagcaggcaaggcagtacctcgagaggagctgtttgtgacctccaagctgtggaatactaagcaccaccctgaggatgtagaacctgctgtccggaagacgctggctgatctgcagctggagtatttggacctctatttgatgcattggccttatgccttcgagcggggagacaatccctttcccaagaatgccgatggaactgtcaaatatgactccactcactataaggagacctggaaggctctggaggcactggtggcaaaggggctggtgaaagccttgggcttgtccaacttcagcagtcggcagatagatgatgtcctcagtgtggcctcggtgcgcccagctgtcttgcaggtggaatgccatccatacctggctcaaaatgagctcattgcccactgtcaagcacgaggcttggaggtgacagcttacagccccttgggttcatcggatcgtgcttggcgccaccctgatgagccagtcctgcttgaggaaccagttgtcttggcactagctgaaaaacatggccgatctccagctcagatcttgctcagatggcaggttcagcggaaagtaatctgcatccccaaaagcatcactccttcccgcatccttcagaacattcaggtatttgatttcacctttagtccagaggagatgaagcaattagatgctctgaacaaaaattggcggtatattgtgcccatgattacggtggatgggaagagagtccccagagatgctggacaccctctgtatccctttaatgacccatactgaggcccgtagtttctcagcttccctttcagttctcctgctaagcattgcctgctactcccaagaaagaaggactcaataaagccattgaagtgt

SEQ ID NO: 3581 - DNA, 3102 bp, Rattus norvegicus
  Genbank Accession No. NM_031011
cggggaaagcagcggactacaagagactgaactgtatctgcctctatttccaacggactcacgttcaactttcgctcacgaaaatagccgggaaaattttattagtcctttttttaaaaaaagttaatataaaattatagcaaaaaaaaaaaaaggaacctgaactttagtaacacagctggaacaatccgcagcggcggcaggagcggcgggagaagagtttaatttagttgattttctgtggttgttggttgttcgctagtctcacggtgatggaagctgcacattttttcgaagggaccgagaaactgctggaggtctggttctccagacagcagtccgacgcaagccagggatctggggaccttcgtaccatcccaagatccgagtgggatgtccttctgaaggatgtgcagtgctcaatcataagtgtgacaaagactgacaagcaggaagcttatgtactcagtgagagtagcatgtttgtctccaagagacgtttcattttgaagacatgtggtaccaccctcttactgaaagcactggttcccctgttgaagcttgctagggactacagtgggtttgactcgattcaaagcttcttttattctcgtaagaatttcatgaagccttctcaccaagggtacccacaccggaatttccaggaagaaatcgagtttcttaatgcaattttcccaaacggagcaggatattgtatgggacgtatgaattctgactgttggtacctgtacactttggatctcccagagagccgagtaatcaatcagccagatcaaaccctggaaattctgatgagtgagcttgacccagcagttatggaccagttctacatgaaagatggtgttactgcaaaggatgtcactcgtgagagtggaattcgtgacctgataccaggttctgtcattgatgccacactgttcaatccttgtggctactcaatgaatggaatgaaatcggatggaacatattggactattcacatcactccagaaccagaattttcttatgttagctttgaaacaaacctaagtcagacctcctatgatgacctgatcaggaaagttgtggaagtcttcaagccaggaaaatttgtgaccaccttgtttgttaatcagagttctaagtgtcgcacagtgctttcttcgccccagaagattgacggtttcaaacgtcttgattgccagagcgctatgttcaacgattacaattttgtttttaccagttttgctaagaaacagcaacaacagagttgattaggaaaaatgaaaaagaaaaaacgcaaaaagagaagacacacaggaggtggtggctgctttctagatgttgatcctgggggccatgctgaccgtgaccaccaccttgtagctgcagaaagccctaggtgtaatgatagtgtaatcattttgaagtgtatgcattattatatcaaggagttagatatcttgcatgaatgctctcttctgtgtttaggtgttctatgccactcttgctgtggaactgaagtgcatgtagaaaagaactctgactgtatgaatctttacgacacttgtgaaaacgattcgacttggtttatgcacagcgtaatatttctgcaggcatcgtccaaaatcccccacagacaaggctttcgtccccattagatgcggcctcagctgaccattggcgactgttctatttgctgccagagtttttacatccagttacctccactttctagagcatattctctactaatgttcaaaaccgatttctacttcatacgggtgtcttatgcaatggcaattaaagttttcttccacaagttgagtctttgtaaggaaatgattccagttgcttgttttgtgttctactgttttagtaattgctcctgcatttatagtcctatggtttttcactacccctgatgaagcaatacacggtcacactgtgggcttacattgtaatcttcaccccagatgggagctcagagacggtcccttgctcatttttccctaagatgtagaatgtggccttgctattggcatgcccttctgtggaagataaatgatggaagtgaaagtatcccgggggtgagcaaggagaaccaccccatggcagtgatgggcttggcagtgcactccgagctctcacagtggagtgcccaccatgccttcactaactcactgagcagtgataggatgcccaccaagtcagagcagaaatctaaccctaaggattctcacctcggtaagtgccgccattgccaccactttactaaaggaagtttccgctcagaggagagtctgtacttcccgcctgtcctaatgtcagctgttctctctggtctttcaccatggcgttcagatgctcaaatgaatggctgatcggccgcagggaggactctccgggttactgggcctggagaatggagaaacaggcacggtattctgacagttaatggcaccagagatgcgggctttcaagagctggcctgttagtggcatttttaagcagaaaagagcaaactagacgaagttccctatttattgccctcccactgtttccttggcagtttctggactggcgcaatgatgccttgttccttccgtatttataacgaagctaaaaagcgtttctaagcatggagtctacttggtttgaaatcaagtggttggaacactgtctggatttttactttacgcagtgttgattgaacgcttcgttggggaagccttcagtccgcttcatcggtctgttctgtaatgagcacagcacacctagtttgaattgctgtttggagggccagtgcttatttgagctgggtcttgtaacccagtagattttggcttgaggtctgactcccccatcttacgaaattaagaattctaatgttggaaattgcatagggtttgcgtggaaaaaagcccagggaaaaaaaaaaaaaaacagaaggcggactagtgatctagtgtgattacaggcggggaagttttggtgccataatttctttgttggtgttggacttttaatcagctgaaatgtatttctgtaccacaatgtaagcttcaataaaagtttgcttaattgtctagtaacatccag

SEQ ID NO: 3582 - DNA, 5775 bp, Rattus norvegicus
  Genbank Accession No. NM_031013
gcccgggtcccgcctcttcctcagcttggagctgggctccgaaggctgctctgggacagagtctcatactgatgaacggagagcactcaatggccacgcctggagagtcctgcgcaggcctgagggtctggaaccagacagaacaggagcctgtggcctatcacttgctcaacctgtgcttcctgcgagccgccgggagctgggtgccccccatgtacctctgggtccttggccccatctacctcctctacatccatcgccatggctgctgctacctccggatgtcccgcctcttcaaaatcaaaatggtgctcggctttgccctcatccttctctacaccttcaacgcggccgtgcctctctggaggatccaccggggcatgccccaggccccagagcttctcattcaccctaccgtgtggctcaccaccatgagcttcgccaccttcctgatccacatggagagaaagaagggggtccgtgcatctgggttgttgttcgggtactggctgctctgctgcctcgtgccagccatcgacactgtccagcaggcctccgcagggagcttccgccaggagcccctccaccacctggccacctacctgtgcttgtccctggtggtggcagagctggtgctgtcttgtctggtagaccagccacccttcttctcggaagactccaagccattgaatccatgtccagaggccgaggcctcttttccctccaaggccatgttctggtgggcctctggactgctatggaagggctacaggaaactgctggggccaaaagacctctggtcacttgagagagaaaactcttcagaagaacttgtttcccagctggaaagagaatggaggaggaacttcagtgagctgccggggcacaaagggcacagtggtatggggacccccgagacagaggccttcctgcagccagagaggagccagcggggcccgctgctcagggctatctggcgtgtgttccggtccactttcctgctggggaccctcagcctggtcattagcgatgccttcaggtttgctgttcccaagctcctcagtctgtttctggagttcatgggcgacctcgagtcctcggcttggacgggctggctcctggctgtgctgatgttcttgtcggcctgcctacagacactgtttgaacagcagtacatgtacagagtcaaggtcctgcagatgaggctgcgaacagccatcactggcctggtgtacagaaaggtcctggtcctgtccagtggttccagaaagtccagtgcagcaggggacgtggtcaacctggtgtcagtggacgtacagcggctggtcgagagcatcctccacctcaacgggctgtggctgctcttcctgtggatcattgtgtgctttgtctacctgtggcagctccttgggccctctgccctcacagccgttgctgtcttcctgagccttctccccctgaacttcttcattaccaagaagaggagcttccatcaggaagaacagatgaggcagaaggcctcccgagcacggctcaccagctccatgctcagaactgtgagaaccatcaagtcccacggctgggagtgtgccttcctggagcgactcctgcatatccggggccaggagctaggtgccctgaagacctccgccttcctcttctctgtgtctctcgtgtccttccaagtgtctacatttctggtggcgctggttgtgtttgctgtccacaccctggtggcagaggacaacgccatggatgcggagaaggcgtttgtgacgctcacggtgctcagcatccttaacaaagcccaggccttcctccccttctctgtgcactgcctcgttcaggctcgggtgtcctttgaccgcctagctgctttcctgtgcctggaagaagtagaccccaatggcatggtcttgagtccctccagatgctcctcgaaggatcgaatttctatacacaatggcaccttcgcttggtcccaggagagcccgccctgcctgcacgggatcaacctcaccgtgccccagggctgtctgctggctgttgtgggtccagtgggggctggaaagtcctccctgctgtctgccctgcttggggagctgttgaaggtagaagggtctgtgagcattgagggttccgtggcctacgtgcctcaggaggcttgggtccagaatacctctgtggtggagaatgtgtgcttcaggcaggagctggatctgccatggttgcaggaagttctagaagcctgtgccttggggtctgatgtggccagcttccctgcaggagttcacaccccagtaggggagcagggcatgaatctttctgggggccagaagcagcggctgagcttggctcgggctgtgtacagaagggctgctgtgtacctgatggatgaccccctagcagccctggatgcgcatgtcagccaggaagtcttcaaacaggtcattggccccagtggacttctccaaggtacgactcggatccttgtaacacacacgctgcatgtcctgccccaagctgaccagatcctggtgctggccaatgggaccatcgcagagatgggctcctaccaagaccttctgcataggaacggagccctggtgggtcttctggatggagccagacagcctgcaggcgaaggagaaggagaagcacatgctgcagccaccagtgatgaccttggaggcttttctggaggtgggacgcccacgcgcagaccagagaggcccagacccagtgacgcagcccctgtgaagggcagtacttcagaggcacagatggagccttctctggatgacgttgaggtcactggactgacagcaggagaggacagtgtgcagtatggccgggtgaagagcgccacatacctgagctacctgcgggcggtgggcacaccgctctgcacctacaccctgttcctcttcctctgccagcaagtggcgtccttctgccaaggctactggctgagcctctgggccgacgacccggtcgtggatgggaagcagatgcattcagccctgcgtggctccatctttggactccttggctgtctgcaagccatcggactgtttgcctccatggctgcggtgttcctgggtggagcccgagcttcatgcctgcttttccggagcctcctctgggacgtggctcgctctcccattggcttctttgagcgcacaccagtcgggaacctgctgaaccgtttttccaaggagacggacatagtggatgtggacatcccagacaagatgaggaccctgctgacctatgcctttggactcctggaggttggcctggcagtgtcgatggccacaccactggctattgtggccatcctacctcttatgctcctttatgctgggtttcagagcctctacgtggccacatgttgccagctgagacgcctggagtcggccagttactcctcagtgtgttcccatctggctgagaccttccagggcagtcaggtggtcagggccttccaggcccaggggcccttcacagctcagcacgatgccctcatggatgagaaccagaggatcagtttcccgaggctggtggctgacaggtggctggctgccaacctggagctcctggggaatggcctggtgtttgtggccgctacatgtgctgtgctgagcaaggctcacctgagtgctggcctcgcgggcttctcggtttctgctgccctccaggtaacacagactctgcagtgggtggtccgcagctggacagatctggagaacagcatggtggccgtggagcgagtacaggactacgttcacacccccaaggaggctccctggaggctgccctcctctgcagcccagcctctctggccctgtgggggacagattgagttccgagactttgggctcagacaccgaccagagctgcccatggctgtgcagggtgtgtccctgaagatccatgcaggggagaaggtgggcatcgtgggcaggacaggggccgggaagtcctccctgacttggggcctgctgcggcttcaggaggccactgagggtggtatttggatcgatggggtccccatcaccgacatggggctgcacacactgcggtccagaatcaccatcatccctcaggaccctgtcctgttcccgggctcgctgcggatgaacctggacctgcttcaggagaacacagatgagggcatctgggcagcgctggagacggtgcagctcaaggccttcgtgaccagcctgcctggccagctgcagtatgagtgctcaggccagggagatgacctgagtgtgggtcagaagcagctcctgtgtctggcacgtgcccttctccggaaaacccagatcctcatcctggatgaagccactgcctccgtggacccagggacggagatacagatgcaggcggccctcgagcgctggtttgcacagtgtacagtgctgctcattgctcaccgcctgcgctccgtgatgaactgcgccagggttctagtcatggatgaggggcaggtggcagagagtggcagtccagcacagctgctggcccagaaaggcctgttttacaggctagcccaggagtcgggcctagcctgagtcaggactcttcccaaacctcctggagccagccacagagcctgcagtagctggagatgccagagactcaggggccacatgatgcccaatctaaactcctttttgggaggaagatagcagagagagtgacagagtattggaataccagacccagaagaacccagcatgcccaggttggcttgagcaaggccacacccaccccaggccaaaaagaacagtgactctcagcccaagctgtctacttcaaggccatacccaccccaggccattcaggttggatgccctggaccggggtgatggcgtgcacatatcccctaactccttattttgaggtcattgtagagttcactcacagttttaagaagccacatggagagaagccgcaaaccctctgccctgtttattccgggggtgacaccttgtccaaccctaggacaagatgaagcatcacactgactccgactgacttgtctttacctctgctgcgtgtgcatcagtgtttggactccgtgctttgtgctctcattggtttttgagacaggatttcacatagcccaggctggccctgaactcactttgttgctgaggatggccttgaacatctgatgctcctgccttccctcccaagtgctgggattatggcctgtgtcaccacgccctgtgtgggggtctcaaacaaggctttgtgtgtgcttgacaggcactcactctaaaaactgtgttacagccccggctctggattcggttctactcctgtttaaaattgtagtggtgaagggtctcttgctcaaactggcctcaaactcgagatgctcctgtctcggtctccagagtgctggaatgacagacgtgtgccactacacctgccttgactcaccacagctaagtagtgacatccccatgggccagggctggtgagtcccgtgcgtgacagtgtgctgagcagtacccttcgcttctgctcagagatgcccttctaaagctgtggcaaagagatttccacacactgccgtgcccccccaggactgcatcatgaattgatccgccctaatagcacccatgactccctgagcagtgatatgttgggttcaggagaggattcctgcttgcttcttggacagggcttgctcttccctcgaccctgaggcttctctgattggctacccttaataaaggatttacgggatttcctttc

SEQ ID NO: 3583 - DNA, 3132 bp, Rattus norvegicus
  Genbank Accession No. NM_031020
gccgctggaaaatgtcgcaggaaaggcccacgttctaccggcaggagctgaacaagaccgtctgggaggtgcccgagcgataccagaacctgtccccggtgggctcgggagcctacggctcggtgtgtgctgcttttgatacaaagacgggacatcgtgtggcagtgaagaagctgtcgagaccgtttcagtccatcattcacgccaaaaggacctacagggagctgcggctgctgaagcacatgaagcacgagaatgtgattggtctgttggatgtgtttacacctgcaaggtccctggaagaattcaacgatgtgtacctggtgacccatctcatgggggcagacctgaacaacatcgtgaagtgtcagaagcttaccgatgaccacgttcagtttcttatctaccagatcctgcgagggctgaagtatatacactcggctgacataatccacagggacctaaagcccagcaacctcgctgtgaatgaagactgtgagctgaagattctggattttgggctggctcggcacactgatgacgaaatgaccggctacgtggctacccggtggtacagagcccccgagattatgctgaattggatgcactacaaccagacagtggatatttggtccgtgggctgcatcatggctgagctgttgaccggaagaacgttgtttcctggtacagaccatattgatcagttgaagctcattttaagactcgttggaaccccaggggctgagcttctgaagaaaatctcctcagagtctgcaagaaactacattcagtctctggcccagatgccgaagatgaacttcgcaaatgtatttattggtgccaatcccctggctgtcgacctgctggaaaagatgctggttttggactcggataagaggatcacagcagcccaagctcttgcgcatgcctactttgctcagtaccacgaccctgatgatgagccagtggctgaaccttatgaccagtcctttgaaagcagggacttccttatagacgaatggaagagcctgacctacgatgaagtcattagctttgtgccaccgccccttgaccaagaagaaatggagtcctgagcaccttgcttctgttctgtccatcccacttcactgtgaggggaaggcctgttcatgggaactctccaaataccattcaagtgcctcttgttgaaagattccttcatggtggaagggggtgcatgtatgtgcgtagtgtttgtgtgtgtctgtctgtctgtccgtttgtccatgtatctttgtggaagtcattgtgatggcagtgacttcatgagtggtagatgctccttggcagtctgcctgctctctcagagtccgggcaggccgatgggaactgccgtctccttagggatgtgtgtgtgtatgttaagtgcaaagtaagaatattaaaatatccctgttcctagttaccttgccacttcggcttctcctgtggccctgcctttaccatatcacagtgacagagagaggctgcttcaggtctgaggctatccctcagccatgcataaagcccaagagaaccaactggctcctgggctctagcctgtgatcggcttgctcatgtcctcagaacctgtcagtctgtttgtgccttaaaaggagagaagggcgcgttgtggtagttacagaatctcagttgctggcgttctgagccaggcaaggcacagggctgttggatggccagtggggagctggacaaaacaaggcagccttcaaggaggccatgggtgcatgtttgcatgagtgtatgtgcaaccgccctccctcacctccaggagcaagctgttttctatgcttacctaagttcacctcagtgcagaggtctccagtgccaggcacaggctcctgccatcagtagcttcctatgtcatcttcacgtcatgcgggtgtttgcatgctgtgctctggagcttgtcctgtcttctggaagccctgggccgggcgtgtgaagacttcccagcagtcctatccacgcacctcagctgaggccacgggcacactgctgcttcctcactccagctacgttgtgttgaacacaactgatcctccaggtgcttgtggtgcaggaaacgggacgaacagagcacctgaacccttgccatctgacatcaccgacacaggagaacagtcctctcctctcctctcctctcctctcctaggacagtccccggctctggaatcatgttcttctcactcatggtagccagctaagaaagctgcaaaccgaacaaagggagaaccgagctcctgaagccaggagctccttttactgtccttctcaaaatagggtcattagacacagccaagtcgtcaaaggcccctttccttgtacggggcccccccgcccccggcagcttgacactgatttcagtgtctatttggggagaaagcaattttgtcttggaattttgtatgttgtaggaatccttagagagtgtggttccttctgatggggagaaagggcaaattattttaatattttgtatttcacctttataaacatgaatcctcaggggtgaagaacagtttgcataattttctgaatttcaggcactttgtgctatatgaggacccatatatttaagctttttgtgcagtaagaaagtgtaaagccaattccagtgttggacgaaacaggtctcgtatttaggtcaaggtgtctccattctctatcagtgcagggacatgcagtttctgtggggcagggtaggaccctgcatcatttggagcccagaaggaggccgactggccaggcctcaccgcctcagtatgcagtccagctccacgtcatcccctcacaatggttagtagcaacgtctgggtttgaacgccaggcgtggttatattattgaggatgcctttgcacatgtggccatgctgtgttaggactgtgccccagggcccggacttgaagctagagctggcagaagagctcctggcatccatggtgcgatgctgccgccacccagtttctccattggaagacaagggaatgagaagactgctgtgtatgtgtatttgtgaacttggttgtgatctggtatgccataggatgtcagacaatatcactggttaaagtaaagcctatttttcagat

SEQ ID NO: 3584 - DNA, 4358 bp, Rattus norvegicus
  Genbank Accession No. NM_031027
aattcccgcagtggagggagggtcagtgtgcgggagactgaggccagaaagcgttgccatggcgggtgtgctgagcagggacgcgccggacatcgagagtatcctggctttaaatcctcgaatacaagctcatgcgactcttcgttccaccatggccaagaaactagacaagaaacattggaaaaggaacactgataagaactgctttatctgtgagaagctggagaataattttgatgacatcaagcacacgactcttggtgagcgaggggctctccgagaagcagtgagatgcttgaaatgtgcagatgctccctgccagaagagttgtcccacgtctcttgacattaagtcattcatcacaagtatcgccaacaagaactactatggtgcagctaagctgattttttccgataatcctcttggtcttacttgcggaatggtttgtccaacatctgacctctgtgtcggaggatgcaacttacatgctactgaagaggggccaattaatattggtggactgcagcagtttgctaccgaggtgttcaaagcgatgaacatcccacagatcagaagcccgttgctgcctcctccggaacatatgccggaagcttactcagcaaaaattgcgctgtttggagctgggcctgcgagtataagctgtgcctcctttctggctcgactgggctattccgacatcaccatatttgaaaagcaagaatacgttggtggcttaagcacttctgaaatccctcagtttcggctcccatatgatgtcgtgaattttgagattgagctcatgaaggaccttggtgtcaagataatttgtggtaaaagcatttccacagatgaaatgactcttagtactttgaaagaaaatggctacaaagctgcttttattggaataggtttgccagaacccaaaaaggaccatattttccaaggcttgacacaagtccagggattttacacatccaaagactttttgccacttgtcgccaaaggtagcaaaccaggaatgtgcgcctgtcactctccattgccatccgtgaggggagccgtgattgtactcggagctggggacactgcgtttgactgtgcaacatccgctctgcgctgcggagcacgtcgcgtgttcatcgtcttcagaaagggctttgctaatattcgagctgttccagaggagatggagcttgctaaggaagagaaatgtgaatttttgcctttcctttccccacggaaggttatagtcaaagatggaaagattgtaggaatgcagtttgttcgaactgagcaggatgaaaccggaaactgggtcgaagatgaagagcagatagtgcgtttgaaggctgatgtggttattagcccctttggatctgtcttggatgatcccaaagtgatagaagcattgagtcccatcaagtttaacagatggggtctccctgaagtaaacccagaaaccatgcaaaccagtgagccatgggtatttgcaggtggtgatgttgtgggtatggctaacaccacagtggaatctgtcaacgatggaaaacaggcttcatggtacattcacgagtacatacaggcacaatatggagccttggtgccttcccagcctacactgcccctgttttacactcctgttgacctcgtggacatcagtgtggaaatggcagggttgaggttccccaatccctttggccttgccagtgcgacaccagccactagcacaccaatgattcgaagggcctttgaagcaggatggggttttgctttgaccaaaactttctctcttgataaggacatcgtgacaaacgtctcacccagaatcatccgagggaccacttctggccccttgtatggccctggacaaagctctttcctcaacattgagctcatcagtgagaaaacagctgcatattggtgtcacagtgtcaccgaactaaaggctgacttcccggacaacatcctgatcgccagcatcatgtgcagttacaacaaaaatgactggatggaactctccaaaatggctgaggcttctggagcagatgccctggagttaaatttatcctgtccacatggcatgggggagagaggaatgggtctggcttgtgggcaggatccagagctggtgaggaacatctgtcgctgggtgagacaatctgttcgggttccattttttgccaagttgaccccaaatgtcactgatattgtaagcatcgcaagagcagcaaaggaaggtggtgcagatggcgttacagccaccaacactgtctcaggcctgatgggactgaaagctgatggttcaccctggccttcggtgggcagtggaaagaggactacatatggaggagtatcaggaactaccatcaggcctattgctttgagagctgtgaccgccattgcccgcgctttgcctgggtttcctatactggccacaggtggaattgactcagctgaaagtggacttcagtttcttcatagtggtgcttcagttctccaggtatgcagtgctattcagaatcaggacttcactgtgattgaagattactgcactggcctcaaagctctgctttatctgaagagtattgaagagttatcagactgggatgggcagagtccacccactatgagtcatcagaaagggaaaccagttccacacattgctgagctcatgggacagaaacttccaagctttggaccgtaccttgaacggcgcaagaaaatcctagcagcaagtaaaatcagagagaatgatcaaaacagagcttgctcacctctccagagaaagcactttaactcccaaaagccgattcctgccatcaaggatgtaattggaaaatcactgcaatacctggggacgtttggtgagctgaacatcatggagcaagttgtggccctgatcgatgaggaaatgtgtatcaattgcggcaaatgttacatgacctgtaatgactctggctaccaggctatacagttcgatccagaaactcacctgcctactgttagcgacacatgtacaggctgcactctctgcctcagcgtctgccctattatggactgtatcaggatggtttccagggcaacaccttatgaaccaaagagaggcctaccattagccgtgaagccggtgtgttaaggtgatttgtaagacagctgctgtgaactttgatgttaccaacacaggctgatctttaaaacaataacaattgtaatcattatgatcagttctttccaaatttgatagctatgcatatataatttctaaataagcgtctaaattggaaaacaatgtctaatgccagtgaccaattaatggtcataaaatggaataattcttctctgaagtagctggtgagtaactgtggaccagttaattggatatgctcggtcagttgtctgctgtgaaaaattaactttttcatggcaattagtgtgacaatttctaaattgccctatgccgtgctcactctttgatttctaattgtaagcgaaatgaactattttggaacggagtgcgctttcatatacaggaaactgtttccaaggaaacactttgtaattaaaaattacctgtaattttaacactgcttctaaggacatgcaattagccccattaagaacaattgaagagagtcacgtcattatttactatgacaaggggaacacaacctggcagagggttttctagagttttcttacatccccctttgctgaagtaactcactctttggtgctggacactggaagggagattatttcctgactaaaatactgttcaccactcatccctgaaacaggtgtcagactgcccaggaatggagcacaggtcatttttatttgaatagcaaagctgtgctcctgatgaaataagatataaagatggatatctagtgaaggccacactgtcactgggcacagaccactcggtctgcttctcatagtcaccttcattatgagagcaattaacgttcaaacaagggctagattacacagcactgagccataggcttcacgctacaacagcaaaaacatcgtatctgaaatttatacataatgagacaaatgggtctgacgacgcttgaatgctcgtatgatttcaaaattgttgaaatcgacgtgtacttttaaatattgataaatattttctgtctctttatttttataatcaataaatagcatcatatgaactcatttattccttctttatgacatactttaaaatgaatctataggaaataagtgagaaataacagtctgtggcatatttctatgataaatgcacgatatctgcaagtgcactttaaaaatgtgtatgactaaataatcacaaataaaattttatgatttattgtggaatt

SEQ ID NO: 3585 - DNA, 1423 bp, Rattus norvegicus
  Genbank Accession No. NM_031034
aggccggggcccgcgcgccatggacgcccctcagccggcgcggcgcggccgcggcctgagggcggtcatgtccggggtggtgcggaccctcagccgctgcttgctgccggccgaggccggagcccgcgagcgcagggcgggcgcggcgcgcgacgcggaacgcgaggcccgacggcgcagccgcgacatcgacgcgctgctggcccgcgagcggcgcgcggtgcggcggctggtcaagatcttgctgctgggcgccggcgagagcggcaagtccaccttcctcaagcagatgcgcatcatccacggccgggagttcgaccagaaggcgctgctggagttccgcgacaccatcttcgacaacatccttaagggctcgagggtgcttgtagacgctcgggacaagcttggcattccctggcagcactctgagaacgagaagcacgggatgtttctgatggccttcgagaacaaggcagggctgcctgtggagcctgccaccttccagctctacgttccagccctgagcgcactctggagagactccgggatcagggaagccttcagccgcagaagcgagttccagctgggtgagtcagtgaagtacttcctggataacttagaccggattggccagctgaactacttccccagtaagcaagacatcctgttggctagaaaggccaccaagggaatcgtggagcatgacttcgtgataaagaaaatcccatttaagatggtggatgtgggcggccagaggtcgcagcgccagaagtggttccagtgcttcgacgggatcacatcgatcctgttcatggtgtcctcaagcgagtatgaccaggtcctcatggaggataggcgcaccaaccggctggtggagtccatgaacatcttcgagaccatcgtcaacaacaagctcttcttcaacgtctccatcatcctcttcctcaacaagatggacctgctggtggagaaggtgaagtcggtgagcattaagaagcacttcccagacttcaagggcgacccgcaccggctggaggacgtccagcgctacctggtccagtgctttgacaggaagcgcaggaaccgcggcaagcctctgttccaccacttcaccactgccatagacaccgagaacatccgcttcgtgtttcatgccgtgaaggacaccatcctgcaggagaacctgaaagatatcatgctgcagtgagacagcccctctgccagtcctctcgtggcctctgtgtggccacatgtctctggtgtgtctgccacctgcatggacctgcagtgggcatctcgaagccacaccatctaatacctggcactaagaatgctggactgtcagccacaccagcgagctgcgggcaagaggatgggagtgtcagtgatagctactgaatcggggactgaaactactgaatcc

SEQ ID NO: 3586 - DNA, 1748 bp, Rattus norvegicus
  Genbank Accession No. NM_031035
ggcgggcgggaaggcgcctcccgcagtcgctcggaactgcggacctgagagcttcccgcagagggccggcggtgggagcggagtgggtcgggcggggccgagccgggccgtgggccgtgtgggggccaggccgggccggcggacggcaggatgggctgcaccgtgagcgccgaggacaaggcggcagccgagcgctctaagatgatcgacaagaacctgcgggaggacggcgagaaggcggcacgggaggtgaagttgcttctgttaggtgctggagaatcagggaagagcaccatcgtcaagcagatgaagatcatccacgaggatggctactcagaggaggagtgccggcagtaccgtgcggttgtctacagcaacaccatccagtctatcatggccatcgtcaaagccatgggcaacctgcagatcgactttgctgacccccagcgtgcggatgatgccaggcagctgttcgcactgtcctgtgctgccgaggagcaaggcatgcttccggaagacctgtcgggcgtcatccggaggctctgggctgaccatggtgtgcaagcctgctttggccgctcacgggaatatcaactcaatgactcagccgcttactacctgaatgacctggagcgcatagcacagagtgactatatccctacacagcaggatgtgctgcggacccgtgtgaagaccacaggcatcgtcgaaacacacttcaccttcaaggacttacacttcaagatgtttgatgtgggtggtcagcgatctgagcggaagaagtggatccactgctttgagggtgtcacggccatcatcttctgtgtcgccttgagcgcgtacgacttggtgctggctgaggatgaggagatgaatcgcatgcatgagagcatgaagctgtttgatagcatctgcaataataagtggttcacagacacctccatcatcctcttcctcaacaagaaggacctgtttgaagagaagatcacacagagccccctgaccatctgtttccctgagtacacaggggccaacaagtatgacgaggcagccagctacatccagagcaagtttgaggacctgaataaacgcaaagacaccaaggagatctacacgcacttcacatgcgccaccgacaccaagaacgtgcagtttgtgtttgatgccgtcactgacgtcatcatcaagaacaacctgaaggactgtggcctcttctgaggggcagtgggcctggcaggatgggccaccgctgactctgctccccactacctgtgaggaagatgggggcaagaagaccatgctccctgcctgttcccccagctgcttctcccctgtctcttctctctgttctcagctcccctgtcccctccctcggctctagacttgggggaggggttgccacaggcctccctgtctaaaacccacctttgtctgaggtgccgggagtggccatggtacctccttactgggcatccattcgggttttctaaccattgtcttgttctgggggtgagcggggagcgcatgcagagtttcccaaggcctatgtctggaggagtaccaattcctccagcctagacccctggctttgtccaacaccagccctgacccaagtccaaatgtttacagggagcctcctgcctaccccactctctgccgcttggaggccccaaaggaaaaagcacaagaagcgtgagagacaccaccattcctggagacaaagcccacctgctcattctcgtagcttt

SEQ ID NO: 3587 - DNA, 1744 bp, Rattus norvegicus
  Genbank Accession No. NM_031039
ctgcagtgtgaagggtgttgtcttacctctcgcagactttcccattcccagccctgatttccccactggacccttctccttctgaaccagcatcctgcctggtttgagcagtcatggcctcacgggtgaatgatcaaagccaggcttcaaggaatgggctgaagggaaaggtgctaactctggacactatgaacccatgtgtgcggagggtggagtatgcagttcgaggacccattgtgcagcgtgccttggagctggagcaggagctgcgtcagggtgtgaagaagccgtttactgaggtcatccgtgccaacattggggatgcacaagccatggggcagagacccatcaccttcttccgccaggtcctggccctctgtgtctaccccaatcttctgagcagtcctgacttcccagaggatgccaagagaagggcagaacgcatcttgcaggcctgcgggggccacagcctgggtgcctatagcattagctctggaatccagccgatccgggaggatgtggcgcaatacattgagagaagagacggaggcatccccgcagacccgaacaacatatttctatccacaggggccagcgatgccatcgtgacaatgctcaagctgctggtatctggcgagggccgtgcacgaacaggtgtactcattcccattcctcagtacccactgtactcagccgcgctggctgaactggacgccgtgcaagtggactactacctggacgaagagcgcgcctgggctctggacatcgcagagctgcggcgcgctctgtgccaggcacgtgaccgttgctgccctcgagtactgtgcgtcatcaaccccggcaaccccactgggcaggtgcagacccgtgagtgcatcgaggccgtaatccgctttgctttcaaagaaggactcttcttgatggctgatgaggtataccaggacaacgtgtatgccgagggctctcagttccattcattcaagaaggtgctcatggagatggggccaccgtattccacgcagcaggagcttgcttctttccactcagtctctaagggctacatgggcgagtgcgggtttcgtggtggctatgtggaggtggtaaacatggatgctgaggtgcagaaacagatggggaagctgatgagtgtgcggctgtgtccaccagtgccaggccaggccttgatggacatggtggtcagtccgccaacaccctccgagccgtccttcaagcagtttcaagcagagagacaggaggtgctggctgaactggcagccaaggctaagctcacggagcaggtcttcaatgaggctcccgggatccgctgcaacccagtgcagggcgccatgtattccttccctcaagtgcagctgcccttgaaagcggtgcagcgtgctcaggaactgggcctggcccctgacatgttcttctgcctgtgcctcctggaagagactggcatctgcgttgtgcccgggagtggctttgggcagcaggagggcacctatcatttccggatgaccattctgccccccatggagaaactgcggctgctgctggaaaaactcagtcacttccatgccaagttcacccatgagtactcctgaagccactgctagggccacactggacagtctctgacgcaacaaaccgagggtccttaggaaccctcagtatttctgattttgtctagggtctcggtaactgtcctgcgggtccctaataaatctgatgtcagcctgaaaaa

SEQ ID NO: 3588 - DNA, 1227 bp, Rattus norvegicus
  Genbank Accession No. NM_031041
cgcggccgccttgaagatggcgtcgaccagccgtttggatgctctcccacgagtcacatgtcccaatcatccagatgcgattttagttgaggactacagagctggcgacatgatctgtcccgaatgcggcctagttgtaggggaccgggttattgatgtggggtctgaatggagaactttcagcaatgacaaagcaacgaaagacccatctcgagttggagactctcagaatcctcttctgagtgatggagatttgtccaccatgattggcaagggtacaggagcggcaagttttgatgaatttggcaattctaagtatcagaaccggagaacaatgagcagctctgatagagctatgatgaacgcattcaaggagatcacgaccatggcagacagaatcaacctcccacgcaatatagttgatcgaacaaataatttattcaagcaagtatatgagcagaagagcctgaagggaagagctaatgatgcgatagcttctgcttgtctgtacatcgcttgtagacaagaaggcgttcccaggacatttaaagaaatatgtgctgtgtctcgaatctctaagaaagaaattggccgttgttttaaactgattttgaaagctttggagacgagcgtggatctgatcacaactggggacttcatgtccaggttctgctccaacctttgcctccccaagcaagtgcagatggcagctacacacatagcccgcaaggctgtggagctggacttggttcctggcaggagtcctatctctgtggcggcagcagctatttacatggcctcccaggcttcagctgagaagcgaacacagaaagaaatcggggatattgctggtgttgctgatgttacaatccgacagtcctacagactgatctaccctcgggctccagatctcttcccttcagacttcaagtttgacaccccagtggacaaattaccccagctataagctgaggcaactaagtgtcacactcttaatgtacatggaactttgtgcatagccacacagtgctggttgagcctttaatgaggaaaaaggagatggtacgcattccacagctaagtattattgcttagtcttctgtatgtatatagtagtgcgacatatttaatgacttaaatttcttactgattctgctttcttttttagtgatctaggaaacagtattttggaagatattaaaatatgtaattctcaaataaaatttt

SEQ ID NO: 3589 - DNA, 1624 bp, Rattus norvegicus
  Genbank Accession No. NM_031043
cagcaccatgacagatcaggcttttgtgacgctcaccacaaacgatgcctatgccaaaggggcgctggtcctgggctcatctttgaaacagcacaggactactaggaggacggttgtactcgccagcccacaggtttcagactccatgagaaaagttttagagactgtctttgatgaagtcatcatggtagatgtcttggacagtggtgattctgctcatctaaccttaatgaagaggcctgagttgggcatcacgttgactaaactccactgctggtcactcactcagtattccaaatgtgtgttcatggatgcagatactctggttctctcaaatattgatgatctttttgaaagagaagaattgtcagcagcaccagacccagggtggcctgactgtttcaattctggagtctttgtctatcaaccctcaattgaaacgtataaccagctgttgcatcttgcttctgagcaaggtagttttgatggtggggaccagggcctactgaatacatattttagtggctgggcaacgacagatatcacaaaacacttgccatttgtgtataacctgagcagcctctcaatatactcctacctcccggcatttaaagcgtttggtaaaaatgccaaagttgtgcacttcctgggacgaaccaagccatggaattacacgtacaatccccaaacaaaaagtgtcaaatgtgaatcccaggacccaattgtgagtcacccagagtttctgaacctgtggtgggacaccttcaccaccaatgtcttacccctgctccaacaccatggccttgtcaaagatgccggttcctatctaatgatggaacatgtcacaggagccttgtcagacctgtcctttggggaggccccacctgcatcacagccttctttgtcctcagaagaaaggaaggaacggtgggaacagggccaggctgattatatgggagcagattcttttgataacatcaagagaaaacttgacacttacctacagtagaagcactgccattttcttgtggacacatccatgtcttaggcacgtttcgatacatagtatgtgaagtctgttacaattgttagaggctttcactaaacctcagcagatgaggggtttgggcaggacaacaggtgagaactgggcaaatgttattaagtaataattctattatgtggacaagtgttgtgtttaaccctagactttttcaaaaactctaaattcttaaattgccaatgtgtgataaagaaaagccaacattgagctactaaattaggctctttcaaatggtgcagaacttgactctccatcttcaaaacaaggtatgagattctccaatatttgcttgttgtatccttcactagacctgcaatgtagaattgttcaaagcctgtcagagaagtagccttctagactaaagtggcctttattaacactgcggagtgattcataagcctaccagctagtgttagttcaccagttttctatgcaccatgaaggcggcatgcagacctgctctttctcagttatctacttgaaaattgcagtgtgctctctgatggtagctgtggaagcactgtgtataacaaataaagacttattgacataaaaaaaaaa

SEQ ID NO: 3590 - DNA, 551 bp, Rattus norvegicus
  Genbank Accession No. NM_031051
gggtcacgtagtcaggtcccagacttgggtcacaccgcacttaacaccgtcctccggccgtcgttcgcagtctctccgccaccatgcctatgttcatcgtgaacaccaatgttccccgcgcctccgtgccagaggggtttctctccgagctcacccagcagctggcgcaggccaccggcaagccggcacagtacatcgcagtgcacgtggtcccggaccagctcatgacttttagtggcacgagcgacccctgcgccctctgcagcctgcacagcatcggcaagatcggtggcgcccagaaccgcaactacagcaagctgctgtgcggcctgctgtccgatcgcctgcacatcagcccggaccgggtctacatcaactattacgacatgaacgcagccaacgtgggctggaacggttccaccttcgcttgagcccgggcctcacttacctgcaccgctgttcttcgagtcttgctgcacgccccgttctgtgtttatccacccgtaatgatggccaccttccggtcgggagaaataaatggtttgagacca

SEQ ID NO: 3591 - DNA, 2337 bp, Rattus norvegicus
  Genbank Accession No. NM_031052
cgtctgcaacgcgagtgcccagcgcaacgtgctaccttggaaacgcagggcctctcttcctgagcgtggcagagcggggtcccgaggatgctgctggcagccgggacgcggtatgcctaccggctgtgcggccggcgagccgcggcggctctgcagggacgcgcaggccggagctgcgcccggagcgtcagcactagctggtccccggtgggcgctgcctttaacgtcaagccccagggccacctgtgggacctgttgggagagcgacggggtctttttggagttcctgagctcagcacccctgaaggattccaagttgcccaggaggaagccttgaggaagacggagtggctggtagagcgagcatgttccacacctccagggccacagacagtcctcattttcgatgagctctcggattgcctctgcagagtggctgacttggcggactttgtgaaaattggacacccagagcaggcgttcagagaggctgcgcaggaggcctgcagaagtattggcaccatggtggaaaagttgaatacgaatgtggaattgtatcagagtctgcagaaattactagatgacaagaagcttatggattcccttgatgcagaaaccaggcgagtagccgaactatttatgtttgattttgaaatcagtggaatccatctagatgaagaaaagcgcagaagagccgtggacctcaatgttaagatcttggacttgagtagtgctttcctcatgggaaccaactttcccatcaagatccagaagcatctcttaccagagcacattcagcaccactttgctcgtgatggaaggcatttagtcatcgatggtctacatgcggaagcctccgatgacctggttcgggaggctgcttataaaatttttctttatcccaatgctgatcagttgaagtgtttggaggagttgctaagcagccgagatcttctggcaaacctagtaggctatctaccttttcccacaggccctccaggaaccatagcccagactccagagactgtcatgcagttccttgagaagctatctgaaaagctctgcgaaagaactagaaaagattttgagatgatgcaaggaatgaaaacaaaactaaatcctcaaaattctgaactaatgccttgggaccctccctactacagtggtgtgattcgtgcagagaggtataatattgagcccagtttatattgtccattcttatcccttggagcttgcatggaaggcctgaatgtcctatttaacagactgttgggcgtcaccttatatgcagaacagcccttcaaaggagaggtgtggtgtattgatgtccggaagctggctgttgttcatgaatctgaagggttgctgggctacatttactgtgattttttccagcgagcaaacaagccacagcaggattgccacttcaccatccgagggggcagattaaaggaagatggcagctatcagctcccagttgtggttctcatgctgaatctccctcatgcttccagggatttccctaccttattaactcctgggatgatggaaaatctcttccatgaaatggggcatgccatgcactcaatgctcggacgaactcggtaccagcatgtcactgggaccaggtgccctactgactttgctgaagttccgtctattctgatggagtatttttcaaatgattaccgagtagtcagccagtttgccaagcattatcagactggtcagccactgccaaaagctatggtgtctcgtctctgtgaatctaagaaggtctgtgccgccgcagaaatgcagctgcaggtcttttatgccgccctggatcaaatctaccatggccagcatcccctgaagaagtcaaccacagacatcctcatggaaacacaagagcagttttatggcttaccctatgttcctgacactgcctggcagctgaggttcagccacctggtgggatatggcgccaagtattactcatacctgatgtccagggctgtggcatccatggtctggaaggagtgcttcctacaggatccctttaacagggccgccggggagcgctaccgcagagagatgttagcccacggtgggggcaaggaacctatgctcatgattcaaggcatgctgcagaaatgtccttccatcgatgattttgtggatgcccttgtgtctgacttgaatctggactttgaaactttcttcatggattctaaatagcagaagcctggctcacgtggataggaaactcgttaccagatcctacagttatgaagccttcactccaacttcagtgttcactgaggaagaaatactttctgacaagccttaaattga

SEQ ID NO: 3592 - DNA, 2059 bp, Rattus norvegicus
  Genbank Accession No. NM_031057
ggcaggagaagtgatctgttatctcacctggcacatgaagcccattcctggaactatgcaaagggcagagtctggtgagccatggcggcggcagtggcggcagcagcagcagtgcggtcccggatcctgcaggtttcttctaaagtaaactccacatggtatccagcatcttctttctcttcatcatcagtgccaactgtaaagctcttcattgatgggaaattcgttgaatccaaaagtgacaaatggattgacatccacaacccagccaccaatgaggttgttggtcgggttcctcagtccaccaaagctgaaatggaggcagccgtagccgcctgcaaacgcgctttccctgcgtgggcagacacatctattttaagccggcagcaggtcctgcttcgttatcagcaactcattaaagaaaacctgaaagaaatcgccaggttaatcacattggaacaagggaagactctggctgatgctgaaggagatgtgttccgaggccttcaggtggttgagcatgcctgcagtgtgacgtccctcatgctgggagagaccatgccatctattaccaaagacatggacctttattcctaccgcctgcctctgggagtgtgtgcaggcatcgcaccatttaattttcctgccatgatccccctttggatgtttcccatggctatggtctgtggaaatactttcctaatgaaaccatcagagcgagtacctggagcaaccatgcttcttgctaagttgcttcaggattctggtgccccggacggaacactgaacatcatccatggacaacatgaagctgtaaattttatttgcgatcatccagacatcaaggcaatcagctttgtgggatccaaccaggcgggagagtacatcttcgaaagagggtcaagaaatggcaagagggttcaagccaatatgggagccaagaaccatggggtagtcatgccagatgccaataaggaaaataccctcaaccagctggttggggcagcatttggagctgctgggcagcgctgcatggctctttcaacagccgtccttgtgggagaagctaagaagtggctgccagaactggtagagcgtgccaagaatctccgcgtcaatgcaggagatcagcctggagctgatcttggtcccctgatcaccccccaggccaaagagagagtctgcaatctgattgatagtggagcaaaagagggggcttccatccttctggatgggcggaaaattaaagttaagggctacgaaaacggtaactttgttggaccaaccatcatctccaatgttaagccaagtatgacttgttacaaagaggagatttttggtccagttcttgtggtcttagagacagaaaccctggatgaagccatcaagattgttaatgacaacccatatggaaacgggactgctatctttaccaccaacggagccatagctcggaaatacgctcacatggtggatgtgggacaggtgggcgtgaatgtccccattccagtgcctttgccaatgttttccttcaccggctctcgatcttccttcaggggagacaccaatttctatggcaaacagggcatccagttttacactcagttaaagactatcacatctcagtggaaggaagaagatgctactctttcctcacctgcagtggtcatgcctaccatggggcgttagaacgttcaagactccatccagcctgagtaacttcccactgtccttggcaatcttcgtctgccatctttgctcaaaacagatccatgaggatggagtatattgcaatgaaattctttctcagaactcgcaatcccttcaaagttatagggagtacaggataacaccaacgccaggccttcacttgttctccatacttctctacggtttttgaggttaactgttgttaagcgtgaagtgtttgcctagaataagagcttagaactgtcttctaacaattcttttctgatgacttggagggacaacgtaggggcccggtccttggcaatcttcgtctgccatctttgctcaaaaacagtccatgaggatggag

SEQ ID NO: 3593 - DNA, 3002 bp, Rattus norvegicus
  Genbank Accession No. NM_031058
atggcagttcagcccaaggagacgctgcagttggagggcgcggccgaggtgggcttcgtacgcttctttgagggcatgccggagaagccgagcaccacggtcggcctcttcgaccgcggcgacttttacaccgcgcacggcgaggacgcgctgctggcggcccgcgaggtgttcaagacccaaggcgtgatcaagtacatggggccggcaggggcaaagaccctgcagactgttgtgctgagtaagatgaattttgagtctttcgtgaaagatcttcttctggttcgtcactatagagttgaagtttataagaataaagctggaaataaggcatctaaggagaacgactggtatttggcatataaggcttctcctggcaatctttctcagtttgaagacatcctgtttggtaacaatgacatggccacttccattggcattatgggtattaaactgtctacggttgatggtcagagacaggttggagttggggatgtggattccacccagagaaagctaggattgtgtgagttccctgacaacgatcagttctccaatctcgaggctcttctgattcagattggaccaaaggaatgcattttaccaggcggagagactgctggagacatggggaaactgaggcaggttatacagagaggagggattctgatcacagaaagaaagagaatcgacttttccacaaaagacatctaccaggatctcaaccggttactgaaaggcagaaaaggagagcagatgaacagcgctgtcttaccagagatggagaatcaggttgcagtttcatcgttgtctgcagtgatcaagttcctagaactcttatcagatgattcgaattttgggcagtttgaactggcgacttttgacttcagccagtacatgaagttagacatggcagcagttagagccctcaaccttttccagggttctgttgaagacaccacaggctctcagtctctggctgcattcttgaataaatgcaaaactgctcaaggacaaaggctggttagccagtggatcaaacagccgctcatggataaaaacaggattgaagagagattaaatttagtggaagcttttgttgaagattcagaattgaggagagctctacaggaggatttacttcgccgatttccagatcttaaccggcttgccaagaaatttcagagacaagcagcgaatttacaagattgttaccgactgtatcagggtgtgaaacagcttcccaacgtcatccaggctctggagaaataccaaggaagacaccaggcattgttgttggcagtttttgtgactcctcttactgatcttcgttctgatttttcaaaatttcaagaaaagatagaaacgactttagatatggatcaggtggagaaccacgaattccttgtaaaaccttcatttgatcctaacctgagtgagctaagagaagtcatggatggtctggagaagaagatgcagtccaccttaataagtgcagcgcggggtcttggattggaccctggcaaacagattaaattggactccagtgcacagtttgggtattactttcgtgtaacctgcaaggaagagaaagtcctccgcaacaacaagaacttcagcaccgtggatatccagaagaatggcgttaaattcaccaacagtgaattgtcttctttaaatgaagaatacactaagaacaaaggagagtatgaggaggcccaggatgccattgttaaagaaatcgtcaatatttcctcaggctacgtggagccaatgcagaccgtcaatgacgtgctagctcacttagatgccgtcgttagttttgctcatgtgtcaaacgcagctcctgtcccctacgtgcgaccggtcatcttggagaaaggaaaaggaagaattatagtgaaagcctccaggcatgcttgtgttgaagttcaacatgacgttgcttttattccaaacgatgtgcactttgaaaaagataaacagatgttccacatcattaccgggccgaacatgggaggaaagtcaacatacatccgtcagacgggggtgattgtgctcatggcccaaattgggtgttttgtgccgtgtgagtcagcagaggtgtccattgtggattgcatcttggctcgagtcggggctggtgacagtcagctgaaaggcgtctccacattcatggctgaaatgctggaaactgcttctatcctcaggtcggcaaccaaagattccttaataatcattgatgagctgggaagaggaacctctacatacgacggctttgggttagcatgggccatatcggagtacatcgcaacgaacattggtgccttttgcatgtttgccacccattttcatgaacttaccgctttggccagtcagataccaaccgttaacaatctccacgtcacagcgctgactaccgaagagaccctgactatgctttaccaagtgaaaacaggtgtctgtgatcagagtttcgggattcatgtggctgaactcgctaatttccctaggcatgtgatagagtgcgccaagcagaaggctctggagcttgaggagtttcagagcattgggacctcacagggacacgatgaaacccagccagctgcaaagaggcgctgcctggaaagagagcaaggtgagaagattattctggagttcctgtccaaggtcaagcaagtgcccttcactgacttgtcggaggagagcgtctcagtgaagctgaagcaactgaaagctgaggtgctggcgaagaacaacagctttgtaaatgaaatcatctcacgggtaaaggctccgtgagaggacagtggagcgaagccagtagggagagctcgcccttaccctgctgtttcctgtagtacttaacaccagaacccggggagcagtgtgctgaagtatttagtgatacttgaaaacatgacggtctatagctgagtaccgtttaaatgggcatggacaactttgagcactatgctgaattttataaataaaatcatgta

SEQ ID NO: 3594 - DNA, 710 bp, Rattus norvegicus
  Genbank Accession No. NM_031065
cttttccggttcccgcagccgcagccatgagcagcaaagtttcacgcgacaccctctacgaggcggtgcgggaagtcctgcacgggaaccagcgtaagcgccgcaagtttctggagacggtggagctgcagatcagcctgaagaactacgaccctcagaaggacaaacgcttctcgggcaccgtcaggcttaagtccacccctcgccccaagttctccgtgtgcgtcctgggggaccagcagcactgtgatgaagccaaggccgtggatatcccccacatggacatcgaggcgctcaagaagcttaacaagaacaagaagttggtcaaaaagctggccaagaagtatgatgcctttttggcctccgagtctctgatcaagcaaatcccacgtatcctgggcccaggcctaaacaaggcgggcaagttcccctccctgctgacacacaatgaaaacatggtggccaaagtggatgaggtgaaatccacaatcaagttccagatgaagaaggtgctgtgtctggccgttgccgtcggccacgtgaagatgaccgatgacgagctagtctacaacatccacctggctgtcaacttcttggtgtccttactcaagaaaaactggcagaacgtccgggctctgtacatcaagagcaccatgggcaagccccagcgtctgtattaggacgctccaataaacctcgttgctgccttc

SEQ ID NO: 3595 - DNA, 1020 bp, Rattus norvegicus
  Genbank Accession No. NM_031073
gtcgacgtccctggaaatagtcatacggatgccatggttacttctgccacgatcttacaggtgaacaaggtgatgtccatcttgttttatgtgatatttcttgcttatctccgtggcatccaaggcaacaacatggatcaaaggagtttgccagaagactctctcaattccctcattatcaagttgatccaggcggatatcttgaaaaacaagctctccaagcagatggtagatgttaaggaaaattaccagagcaccctgcccaaagcagaggcacccagagaaccagagcagggagaggccaccaggtcagaattccagccgatgattgcaacagacacagaactactacggcaacagagacgctacaattcaccccgggtcctgctgagtgacagcacccctttggagccccctcccttatatctaatggaagattatgtgggcaacccggtggtaaccaatagaacatcaccacggaggaaacgctatgcagagcataagagtcaccgaggagagtactcagtgtgtgacagtgagagcctgtgggtgaccgacaagtcctcagccattgacattcggggacaccaggttacagtgttgggagagatcaaaaccggcaactctcctgtgaaacaatatttttatgaaacgaggtgtaaagaagccaggccagtcaaaaacggttgcagggggattgatgacaaacactggaactctcagtgcaaaacgtcgcaaacctacgtccgagcactgacttcagaaaacaacaaactcgtaggctggcgctggatacgaatagacacttcctgtgtgtgtgccttgtcaagaaaaatcggaagaacatgaattggcatctgtccccacatataaattattactttaaattatatgatatgcatgtagcatataaatgtttatattgtttttatatattataagttgacctttatttattaaacttcagcaacccttacagtatataagcttttttcataatcgggctgctcaaaaaaaaaa

SEQ ID NO: 3596 - DNA, 3111 bp, Rattus norvegicus
  Genbank Accession No. NM_031077
gttggccaccatggggatgtaccaagtgagactgtagggaaagaaggtggtgactcgcgtgcctggctactggctgctgctcacctcgatgctacaagattcctagcaagatcaaaactgaccattaacctacctctacatccccctggcgccgttccagggccaacgccacattccctgctgggcacgcaatggccgcaccccctcccgctacagaaggctcttttggtacacgcagtccgaggtcgccatggatcggatgaagaagatcaaacggcagctgtcaatgacactccgagggggccgaggcatagacaagaccaatggtgtccctgagcagataggcctagatgagagtggtggtggtggtggcatgacccttggagaagctcccacccgtgttgcccctggggaacttcgctctattcggggcccactcagctctgcaccaggtctacctgggtttcccagtctgctctaggggccatgtacacaaatggatacgatgaagaaatatattatattgggggaaagagagtgttcttgactccaaaggcctggcctttccctcactctgcaccagagattgtgcatgaagacatgaagatgggatctgatggggagagtgaccaggcttcagccacatcctcagatgaggtgcagtctccagtgagagtgcgcatgcgcaaccaccccccacgcaagatctccactgaggatatcaacaaatgcctgtcactaccagctgacatacggctgcctgagggctaccttgagaagctgaccctcaatagccccatcggtgataagcctcttagccggcgcctccggccagtcagcttgtctgagattggctttggaaaactggagacctacatcaaactagacaagctgggtgagggtacctatgccactgtctacaaaggcaaaagcaagctcacagacaaccttgtagcacttaaggagatcagactggaacacgaagaaggggcaccctgcactgctatccgggaagtatccctgcttaaggacctcaagcatgccaacatcgtcacactacatgacattatccacacagagaagtccctcacccttgtctttgaatacttggacaaggacctgaagcagtacctggatgactgtggaaatgtcatcaacatgcacaatgtgaaactgttcctgttccagttgctccgtggcctggcctactgccacaggcagaaggtgctacaccgagacctcaagccccagaacctactcatcaacgagaggggagagctcaaactggcagactttggcctggcttacgccaagtcaattcctactaaaacatactccaacgaagtggtgacactgtggtaccggccccctgacatcttacttgggtccacagactactccggccaaattgacatgtggggtgttggctgcatcttttatgagatggccacaggccggcccctcttcccaggctccacagtggaagaacagctgcacttcatcttccgcattttgggaaccccaactgaggacacatggccaggtatcctgtccaatgaagagtttagaacatacaactaccccaagtaccgagccgaggcccttctgaggcatgcaccccgacttgaatgcgatggagctgacctcctcaccaagctgctgcagtttgagggtcgcaatcggatctctgctgaggatgccatgaaacatccattctttctcagcttgggggagcggatccacaaacttcctgacactacttccatatttgcactaaaggaggtacagctacaaaaggaggccaacattcggtccacttctatgcctgactcaggcaggccagctttccgtgtggtggataccgagttctaagccaagttttaagccacagacagaccaaggccccagcaggcagcggctggagggatgccacacccctcacaggacagcccccatctgcaatcctccctgcttgttgcctgcttacctgcctgagccacactcccctgccaacttgtcccctgccacctgtccaaacaccgaactactggcctggcctgtcaacccaaccactggcctgtctgctgggtgctaacaaagctctcaccactactttgcttgatgtgtctgtctctgtcttggtagatgctggtggaccgaatggccgtgccagctttccacactaaggctaggccttcccctcttcatcacactctctcccaggaccactaccccatggccagccaggggtttggagctagcccaggccaggctcttaatcgactttgactagaaggtagtgagtgatgccttgggtctgagcatcatttgcctgcttcccacctgtcccacttgcctctgttgtatgggcttttttttagtttcttttattgtttttttattattttaaatgaggttctcactttttaatgcaatatctctgtatacagactggttgggcactactccctgagtgtggcactcccacagtattttgtgcaatgaagtcccactcccaccctttgagaggtagggacccagaccctattcagatcctcaccatcactagaccctggaattggctatgggaaagcatgcctcagccactcaccttcctcccctacctagcgttcccagctatagggggacctgagaactaccagagagtgggagatggacatggtggggcctactttttccctccttcagtcccgtagccagggcctccttccttctcagggtcttccccagcccagctctgcctagccctcctgccctgtcctactcggtgctgttgagtaggggctctgcctggaatcgagcagcttagtgaggagccatatataatatgtgcacaagcaggaggacatgtgggagcttgtgcccaattgttacaccccaatccctaggagggtcaggcaggccaaggacagtctcctggatggatggtttgctccccttactccaccttaagccttgggacccttaagcagggtgggagggcaagggagggtgccctcctagtggggtttggggggattgggttcctgaatgcaccataatcgctgtatgaaatattaaaaaaaagtctaaagtgaaaaaaaaaaaaaa

SEQ ID NO: 3597 - DNA, 3205 bp, Rattus norvegicus
  Genbank Accession No. NM_031083
ttactatggcatcggtagtgtcctgacagttcggaaagcaggaaagcaagcgccgagaagaaaggctcgggcccagcggactcttacatcgcaacccatcaaggaattgttattttgggtcctgcaagtggggtccggtccaacttgaggtagcgtgaaggccccttcaggcggcgccgcgggcagccccgcagccggggcctggtgcagccgccgcggccgctgtcagggaagcgcaggcggccaatggaacccgggagcggccgctgctgctgaggcggcggtgtcggcagtccgaccccgaccgcctgcaccccctccgcgagggtcccccggagcttggaagctcgaagtctggctgtagccatgggagacatggtagtggagcctgccaccctgaagccaacttctgagcctactcctagcccatcagggaataacgggggctccctactaagcgtcatcacggagggggtcggggaactgtcagtgattgaccctgaggtggcccagaaggcctgccaggaggtactggagaaagtcaagcttttgcatggaggtgtagccatctctagcaaaggcagcccactggagttggttaatggggatggtgtggacaatgagatccgttgcctagatgatccacctaccgagatcagggaggaagaagatgagatggagcctggtgtggtctctggcacagccaaaggaacaagaagaagacgacagaacaactcagccaaacagtcttggctcctgaggctgtttgaatcaaaactatttgacatctctatggccatttcatacttgtataactccaaggagccgggagtgcaagcctacattggcaaccggctcttctgctttcgcaatgaggatgtggacttctatttgccccagttgcttaacatgtatatccatatggatgaggatgtgggtgatgccattaaaccctacatagtccaccgttgtcgccagagcatcaacttttccctccagtgtgccctgttgcttggggcctactcttcagacatgcacatttccactcaacgacactcccgagggaccaagttacggaagctaatcctctcagatgagctgaagccagctcaccgaaagagggagctgccaactttaagcccagcccctgacacaggactgtctccctctaaaaggactcaccagcgctctaagtcagatgccacggccagcataagtctcagcagcaacctgaaacgaacagccagcaaccctaaagtggagaatgaggatgaggagctctcctccagcaccgagagtattgataattcattcagttcccctgtccggctggcccctgagcgagaattcatcaagtccttgatggcaatcggcaaacggctggccacgctccccactaaagagcaaaaaacacaaaggctgatctcagaactttccctgctcaaccataagctccctgcccgagtctggctgcccacagctggctttgaccaccacgtggtccgtgtgccccacacacaagctgttgtcctcaattccaaggataaggctccctacctgatctatgtggaagttcttgaatgtgaaaacttcgacacaactaatgttcctgcccggattcctgaaaaccgaattcggagtacgaggtctgtggagaacctgccggaatgtggtatcactcacgagcagcgggctggcagcttcagcactgtgcccaattatgacaatgacgatgaagcctggtcggtggatgacataggcgagctgcaggtggagctcccagaagtgcacaccaacagctgtgacaacatctctcagttctcggtggacagcatcaccagccaggagagcaaggagcctgtgttcattgcggcaggggacatcagacggcgcctttcagaacagctggctcacactcccacagccttcaaacgagaccctgaagacccttctgcagtcgccctcaaagagccctggcaggagaaagtgcggaggatcagagaaggttccccgtatggccatcttcccaattggcgactcctttcagtcattgtcaagtgtggagatgaccttcgccaggagctgctggctttccaggtgttgaaacaactgcagtccatttgggaacaggagcgagtgcctctttggatcaagccatataagattcttgtgatttcagctgacagtggcatgattgaaccagtagtcaacgctgtgtccatccaccaggtgaagaaacagtcacagctctccttgctcgattacttcctgcaggagcatggcagttacaccactgaggcattcctcagtgcccagcgcaattttgtgcaaagttgtgctggctactgcttggtctgctacctattacaagtcaaggacaggcacaatgggaacatccttctggacgcagaaggtcacatcatccacatcgactttggcttcatcctttccagctcaccccgaaacctgggcttcgagacgtcagcctttaagctgaccacagaatttgtggatgtaatgggcggcctgaacggtgatatgttcaactactataagatgctcatgctgcaagggctgatcgctgctcgcaaacacatggacaaggtggtacagattgtggagatcatgcagcaaggttctcagcttccttgcttccatggctccagcaccattcgcaacctcaaagagaggttccacatgagcatgactgaggagcagctgcagctgctggtggagcagatggtggacggcagcatgaggtccatcaccaccaaactctacgatggcttccagtacctcaccaatggcatcatgtgacaccactttcaggcccagaagtggtgggattgaaggcaccctccttaggaggacccttgcctaagaaaacctaaatcacaaaatcccacctacctaaccacctacccaagggaaatggaaggcaaaaaacacaaaggatcatgtggtaaccatgagagctggccaaagggtaggagagccaaccatggggtccagacttgctggggcttccccacctcttgctgtgtcagtattgccacctgacagatcccaggactcactgccctccagagaacagagatgatgaacatgaggaggactggaaccttcttcccctcggggatctcatcttttactatccctgggtcccagcaagatgggaggagtgggttcttggtacttaggactt

SEQ ID NO: 3598 - DNA, 2088 bp, Rattus norvegicus
  Genbank Accession No. NM_031087
ccggcggagcagctgtttctttaaggttgagcctctgatcagctgggaacccagcagaaggcaaaggtttctgttgatgtcttctcacctgccctgggctgtgaccgcccgggagagaccatgctcacattcatggccactgatagcgaggaagaggtgtgcgatgagcggacgtccttgatgtcagccgagagccctacatcacgttcctgccaggacagcaggccaggcccagaggatggagagaacactgcccagtggaggagccaggagaacgaggacgactgtgaggaggacccggaccactatgcctgcagtggggttcctgggcgaccatcgggcctggaggaggagctgaccctcaagtatggggcgaagcacgtgatcatgctgttcgtgcctgtcacgctgtgcatgattgtggtggtggccaccatcaagtccgtgcgtttctacacggagaagaacgggcagctcatctacacgcccttcaccgaggacacaccctctgtgggccagcggctcctcaactccgtgctgaacactctgatcatgatcagcgtcattgtggtcatgactatcttcctagtggtactctacaaatatcgctgttacaagttcatccatggctggctgatcatgtcctccctgatgctcctcttcttgttcacctacatctacctcggggaagtgttcaagacctacaatgtggccatggactaccccacactgttcctggctgtctggaacttcggggcagtgggcatggtgtgcatccactggaagggtcccctggtgctccagcaggcttacctcattgtgatcagcgcactcatggccctggtgttcatcaagtacctgccggagtggtccgcttgggtcatcttgggcgccatctctgtgtacgatctcgtggctgtgctgtgccccaaagggccactgaggatgctggtggaaactgcccaggaaagaaacgagcccatatttcctgccctcatatactcatctgccatggtgtggacggtaggcatggcgaagctggacccctcctctcagggagcactgcagctcccttacgatccagagatggaagaagactcctatgacagttttggggaaccctcataccctgaagccttcgaagctccccagcctggctacccaggggaagagccggaggaggaggaggaaaggggtgtaaagcttggtctgggagacttcatcttctacagcgttctggtgggcaaggcagcagccacaggcaacggagactggagcacgacgctggcctgctttatcgccatcctcattggcttgtgtctcaccctcctgctgctcgccgtgttcaagaaggccctgcccgccctccccatctccatcaccttcgggctcatcttttacttctccacagacaacctggtgcgtcctttcatggacacgttggcctcccaccagctctacatctgacagaagagctgcggctctgagagctgtaggacgcttcgccgaatgcaggtgtatagttttacactctagtgccatatatttttttttaaaaaaacctttctttccttacaaaagaaaaaaaaagaataaaaaagtgttgtgtttacttcgtgacgaggaagcagaagccgcccttctgtgctagctgtcttgtcaccagactgaggcttgcccgtcagagcatctgtggcacccgcaggtgggatgctgggccaacaagcctatcttcagggatgaggtcacgtgtgtggatcaggttggagaggacgcaggccccatccaggtctgtaatcaatccttcagggctgagcaggaggaacatgtgcgtcagtggggaccaggaggcacggtcaggaaggacgctaagcaccaacaccctgaccagaggacaaaagccagtttgtcgtcatgaatgcccccagtgctttgtttgtgatgtctgttacctttagtatcttagaagctgagtcctgttcttatttctgcagtggactgctgggaagtggcttaatgacaataccaatacatagatgtccctgctggaaaaaaaaaaaaaaaaaaaaaaaaaaaaaaaaaaaaaaa

SEQ ID NO: 3599 - DNA, 952 bp, Rattus norvegicus
  Genbank Accession No. NM_031093
cggccaggttgacagttgggcagaagctcttggttcctcttcaagtggtaatgccttcatgccaactttgccgaagtaacctggatgatatttgtcaaagttgatcctgtggtgatgcatgcctccagcattcccgcggcctcctgggtgcttgcggtgcttaccgatgcgaccgtggccgtggctcacgtggccccggagtttccgtcttcctaccagtctggatggcatggcggtgcagattcttttcagtcctctgaagactgcacacaggatggctgcaaacaagcccaagggtcagaattctttggccttacacaaagtcatcatggtgggcagtggtggtgtgggcaagtctgctctgactctgcagttcatgtatgatgagtttgtagaagactatgaacctaccaaagcagacagctacaggaagaaggtagtgctggatggggaggaagtgcagatcgacatcttagatacagcagggcaggaagactacgctgcaattagagacaactacttccgaagtggggaaggattcctctgtgtcttctctatcacagagatggagtcctttgcagctacagcggacttcagggaacagattttaagagtaaaagaagatgagaatgtcccatttctcctggttggtaacaaatcagatttagaagataaaaggcaggtttctgtagaagaggcaaaaaacagagctgaccagtggaacgttaactatgtggagacgtctgctaaaacgcgcgccaacgttgacaaggtattttttgatttaatgagggaaatacgagccagaaagatggaagacagcaaagaaaaaaatggaaaaaagaagaggaaaagtttagccaagagaatcagagaaagatgctgcattttataatcaaagcccaaactcctttcttatcctgacctgaccatactaataaatataatttat

SEQ ID NO: 3600 - DNA, 1069 bp, Rattus norvegicus
  Genbank Accession No. NM_031099
tcgcttgcgtcctggaggtgctacatactgcgcatgcgtacgcgactccggtctttttccccctagcgcggccgactctgcaggtctgcgtggagccgcagttgcgggtctctgttccgcaggatggggttcgtgaaagttgtcaagaataaggcctactttaaaagataccaagtgagatttagaaggcggcgagagggtaaaactgactactatgcacggaaacgattggtgatccaggacaaaaataagtacaacacaccgaaatacaggatgatagttcgtgtaacgaacagagacatcatctgccagattgcatatgcccgtatagaaggggatatgatcgtctgtgcagcatatgcacatgaacttccaaaatacggtgtgaaagttggcctgacaaactatgctgcagcctattgcactggcctgctgctggcccgcaggcttctgaataggtttggcatggacaagatctatgaaggccaagtggaggtgaatggagacgagtacaatgtggaaagcatagacggtcagcctggtgccttcacttgctatctggatgcgggtcttgcccgaactacaactggcaataaagtttttggcgccctgaagggagctgtggatggaggcttatctatcccccatagtactaaacgattccctggctatgactctgaaagcaaggagttcaatgcagaggtgcaccggaagcacatcatgggtcagaatgtggcagactacatgcgctacctgatggaggaggatgaggatgcgtataagaaacagttctctcagtacatcaagaacaacgtgactccagacatgatggaggagatgtataagaaagctcatgctgctatccgagagaatccagtctacgagaagaagcccaagagagaagtgaagaagaagaggtggaatcgtcccaaaatgtctcttgcccagaagaaagaccgggttgctcaaaagaaggcaagcttcctcagagctcaggaacgggctgctgaaagctaaagccattttctatgaagattttttcataaagacaataaacattgatcaaagc

SEQ ID NO: 3601 - DNA, 722 bp, Rattus norvegicus
  Genbank Accession No. NM_031101
tcctttccgctcggccgttctcctgtacaggaggcagccatggcgcccagccggaatggcatgatcctgaagccccacttccacaaggactggcagcagcgagtggacacgtggttcaaccagccggcccgcaagatccgcagacgcaaggcccggcaggcgaaagcgcgccgcatcgcccctcgccccgcgtccggtcccatcagccccatcgtgaggtgccctacagttagataccacaccaaggtccgggctggcaggggcttcagcctggaggagctcagggtggctggtatccacaagaaaatggcacgcaccatcggcatctccgtggacccaaggaggcgaaacaaatccacggagtcactgcaggccaacgtgcagcgcctgaaggagtaccgctccaagctcatacttttccccaggaagccttctgctccgaagaagggagacagttctgctgaagaacttaaattggccacgcagctaacaggacctgtgatgcccatccggaatgtgtacaaaaaggagaaggccagagccatcacggaagaggagaagaactttaaggctttcgccagccttcgcatggcccgagccaatgcccggctcttcggcatccgagcaaagagggcgaaagaagccgcagagcaagacgttgagaagaagaaataatgcgcggctggagagttgtaataaattttccataaagcaaaaaaaaa

SEQ ID NO: 3602 - DNA, 607 bp, Rattus norvegicus
  Genbank Accession No. NM_031102
catgggtgttgacattcgccacaacaaggaccgaaaggttcggcgcaaggagcccaagagccaggatatctacctgcggctgctagtcaagctgtacaggtttctggccagacggaccaactccaccttcaaccaggttgtgctgaaaaggttatttatgagccgaactaaccggccacctctgtccctgtcccgaatgatccggaagatgaagcttcctggtcgggagaacaaaactgctgtggttgtggggacgatcacagatgatgtgcggattctggaagtgcccaagctgaaggtgtgtgcactgagggtgagcagccgggcccgaagtcggatcctcaaggctgggggtaagatcctgaccttcgaccagctggccctggagtctcccaagggcaggggcactgtgctcttgtctggtcctcggaagggccgagaggtgtaccgacactttggcaaggccccaggaactccacacagccacaccaaaccctatgtccgttccaagggccggaagttcgagcgtgccagaggccgaagggccagccgaggctacaaaaactaaccctggctcttactgttaataaaaaagctttggatgttg

SEQ ID NO: 3603 - DNA, 703 bp, Rattus norvegicus
  Genbank Accession No. NM_031103
ctttcctttcgctgctgcgtctgcagccatgagtatgcttaggctacagaagaggcttgcctctagcgtcctccgctgtggtaaaaagaaggtgtggttggaccccaatgaaaccaacgaaatcgccaatgccaactctcgtcaacagatcaggaagctgatcaaagatggcctgatcatccggaagcctgtgactgtccattcccgggctcgatgccggaagaacaccttggcccgacggaagggcaggcatatgggcatagggaagaggaagggtactgccaacgctcggatgcccgagaaggtgacctggatgcgaaggatgaggatcctgcgccggcttctcaggagataccgggaatctaagaagattgaccgtcatatgtatcacagcctgtacctgaaggtcaaagggaatgtgttcaaaaacaagcggattctcatggagcacatccacaaactgaaggcagacaaggcccgcaagaagctactggctgaccaggctgaggctcgcaggtctaagaccaaggaagcacgaaagcgccgggaggagcgcctccaagccaagaaggaggagatcatcaagactctgtccaaggaggaagagaccaagaaatgaagcgtccctcgtgtctgtacatagtggccaggctatggcctcacatggatcagtcattaaaataaaacaagccttcgtccttgt

SEQ ID NO: 3604 - DNA, 366 bp, Rattus norvegicus
  Genbank Accession No. NM_031106
ttccggtctctttggcctcgccggtagaagcaagatgacgaaaggaacgtcatcctttggaaagcgtcgcaataagacgcacacgctgtgccgccgctgtggctccaaggcctaccaccttcagaagtcgacctgtggcaaatgtggctaccctgccaagcgcaagagaaagtataactggagtgccaaggctaagaggcgaaacactaccgggactggtcggatgaggcacctaaagatcgtctaccgaagattcagacatggattccgtgaaggaacaacacctaaacccaagagggcagctgttgcagcatccagttcatcttgaggatttcaatcggtcataaaataaatcttctggtttca

SEQ ID NO: 3605 - DNA, 3131 bp, Rattus norvegicus
  Genbank Accession No. NM_031107
cggcgcggcggacggcccagccagagcgcgaggggctggggggcgtgcgggggtatcggtgcagcagcaaggaccccggggcccagaggcggcacagcccggggccgcccggaggagcgcgggcggtccggcggcggcgcgatgccgctcgcccagctcaaggaaccctggccgctcatggagctggtgccgctggacccggagaatggacaggcttcaggggaagaagctggacttcagccatccaaggatgagggcatcctcaaggagatctctatcacacaccacgtcaaggcaggctctgagaaggctgatccatcccattttgagctcctcaaggttctgggccaaggatcctttggcaaagtcttcctggtacgcaaggtcacccggcctgacaatgggcacttgtatgccatgaaagtattaaagaaggccacgctgaaagtgcgtgaccgtgttcggaccaagatggagagagacatcctagctgacgtgaaccaccccttcgtagtgaaactgcactatgccttccagaccgagggcaagctctatcttattctggactttctgcgtggtggagacctgttcacacgactctcaaaggaggttatgtttacagaggaggatgtgaagttttacctggctgagctggcactgggcctggaccacctgcacagcttgggcatcatttacagagacctcaagcctgagaatatccttttggatgaggagggccacatcaaactcactgactttggcctgagcaaggaggccattgaccacgaaaagaaggcctattccttctgcgggaccgtggagtacatggcgcccgaggttgtcaaccgccagggccacacccacagtgcagattggtggtcctatggggtgttgatgtttgagatgctgacgggctccctgcccttccaggggaaggaccggaaggagaccatgaccttgattttgaaggcaaagctaggcatgccccagtttctgagcacggaagcccagagcctcctgcgggccctgttcaagaggaatcctgccaaccggcttggctcaggccccgatggggctgaggaaattaagagacatatcttctactctaccattgactggaataagctctaccgccgtgagatcaagccacctttcaagcccgctgtggcccagccggatgacaccttctactttgataccgagttcacgtcacgcacacccagggattcgccgggcatcccccccagtgctggtgcccatcagctcttccgtggcttcagcttcgtggccaccggtctgatggaggatgacagcaagcctcgggccacccaggctccgctgcactcggtggtacagcaactccacgggaagaacttggttttcagcgatggctacatagtaaaggagacgatcggcgtgggctcctactctgtgtgtaagcgctgtgtccacaaggccaccaacatggagtacgcagtcaaagtaatcgacaaaagcaaaagagatccctccgaagagatcgagattcttctgcggtatggacagcaccccaacatcatcaccctgaaagatgtgtatgacgacagtaagcacgtatacctggtgacagagctgatgaggggcggggagctgctggataagatcctacggcagaaattcttctcagagcgggaggccagcttcgtcctgtacaccatcagcaagactgtggaatacttgcactcccaaggggtcgtccacagggacctcaaacccagtaacatcctgtatgtggatgagtctgggaaccccgaatgcctacgaatatgcgactttggctttgccaagcagctacgggctgagaacgggcttctcatgacaccttgctacacagccaactttgtggcacctgaggtgctgaagcgtcagggctacgatgaaggctgtgacatatggagcctgggcgttctgctgtacacgatgctggcaggatacactccatttgccaatgggcccagtgataccccagaggagatcctcacccggatcagcagtgggaagttcaccctcagtgggggaaactggaacacggtttcagagacagccaaggacttagtatctaagatgctgcatgtggacccccaccagcgcctcacagccaaacaggttctgcagcacccgtggatcacccagaaagacaagctcccccagagccagttgtcccaccaagacctgcagcttgtgaaggggggcatggcagctacatattctgcactcagtagctccaaacccaccccccagctcaagccaatcgagtcgtccatcctggcccagcggcgggtgaggaagctgccatccaccaccctgtgaacgacagtgcgagcaaactcctctgaggcagagtccttccagagggagcaagcctgagtcacagaccaagtggaatggagtcctaaaggaagcaactagcccagctcacccgtgcgggtgtgaagtgccttcctccccaggacgggctcttctgggctcaggctccattgtgtgaaatccactcactgtacaaactatttttaagaaaggaaaaagaaaaaatgacatcatttaccatggattttttttttacaagatccatttggctttttggccattgcagtcccaggaggaacacccagtcccatgtgtggccaagactcccgtgatagctttgggactccgcccctctgttggtcaaggagccatctgcacccgcctccgagcacgttcggcgttgcctctcagagttgtcgactggctcctcagcagaacttggtgtccccagccatctctttttccattctgttctggggttctcgaaccactttctgctaagagcccgggactccaccctgtgcagctcttggctcaggcaccagcatccacagcgccccatgcgcagttgggcccctgcagtcagaacgggcagccccgtggagaggagacggagagcactttttgggagacttcctgttctgccactggacagagttcacaggagaccagggaggtagtccacgggggatgagggctttttccctttcctcctcagctggtaactcagggttcatctgtccaaggcctttctaataaacctacagtccagtcaaaaaaaaaaa

SEQ ID NO: 3606 - DNA, 688 bp, Rattus norvegicus
  Genbank Accession No. NM_031108
ggcgcagcgggcctagcctagtcaacatgccggtcgccagaagctgggtttgtcgcaaaacctatgtgaccccacggagacccttcgagaaatcgcgtctcgaccaggagctaaagttgattggagagtatggactccggaacaaacgtgaggtgtggagggtcaaatttaccctggcgaagattcgtaaggctgcccgggagctgttgacgctggacgagaaggatcctcggcgtctgtttgaaggcaacgctctgctgagacgacttgttcgaattggggtgctggatgagggcaagatgaagctggattacattctgggcctgaagattgaggatttcttggagagaaggctgcagacccaggtctttaagctgggcctggccaaatctattcaccatgcccgtgtgctcatccgccaacgtcacatcagggtcctcaagcaggtggtgaacatcccatctttcattgttcgcctggactctcagaagcacattgacttttccctcctttctccttatggtggtggccgcccaggacgagtgaagaggaagaatgccaagaaaggccagggtggtgctggagctggtgatgatgaggaagaggattaattaattaattaataccttgttgcactggaggattgtctagttttcccgttgacaaataaaacagaattgatacttga

SEQ ID NO: 3607 - DNA, 610 bp, Rattus norvegicus
  Genbank Accession No. NM_031109
ggggggggggggggggagcctccgcctcggaccctgtagccgccgcgatgttgatgcccaagaagaaccggattgccatctatgaactcctttttaaggaaggggtgatggttgccaaaaaagacgtccacatgcccaaacaccccgagctggcagacaagaacgttcccaaccttcacgtcatgaaggccatgcagtctctcaagtctcgaggctacgtgaaggagcagtttgcttggagacatttctactggtacctcacgaatgagggcatccagtacctccgagattacctgcacctacctccggagatcgtgcccgccaccctgcgccgcagccgtcccgagactggcaggcctcggcccaaaggtccagagggtgagcggcctgcaagattcacaagaggggaggcagacagagacacctacagaaggagcgctgtgccccctggagctgacaagaaagctgaggctggggctggctcggcaacggagttccagtttagagggggtttcggtcgtggacgtggtcagccacctcagtgaagttggagattatgttgtgttgaataaactttaaaaaaaaaaaaaaaaaaccccccccccccccc

SEQ ID NO: 3608 - DNA, 359 bp, Rattus norvegicus
  Genbank Accession No. NM_031111
tttctgtgttctccgtagacccgtgagcagggacggcctcggtatgcagaacgacgccggcgagtttgtggacctgtacgtgccgcggaaatgctccgcgagcaaccgcatcattgctgccaaggaccacgcgtccatccagatgaatgtggccgaggttgacaggagtacaggccgatttaatggtcagtttaaaacctacggcatctgcggggccattcgcaggatgggcgagtcagatgattctattctccgattggctaaggctgatggaattgtctcaaagaacttttgagccagaagaaatcgggaataatttgttataaataaaagtgataataagtaaaaaaaaaaaaaaa

SEQ ID NO: 3609 - DNA, 466 bp, Rattus norvegicus
  Genbank Accession No. NM_031112
tcctcctttacagctcgggcaccgtagccatcatgaatgacacggtaaccatccggaccaggaagttcatgacaaaccgtctgcttcagaggaaacagatggtcattgatgtccttcatcctgggaaggccacagtaccaaagacagaaattcgggaaaagctggccaagatgtacaaaaccacaccagatgtcatctttgtatttggattcagaacccactttggtggaggcaagacaactggctttggcatgatctatgattctttagattatgcaaagaagaatgagcctaaacacagacttgcgagacatggcctttatgagaagaaaaagacctcccgcaaacagcgaaaagaacgaaagaacagaatgaagaaggtcagggggactgcaaaggccaatgttggtgctggcaaaaagccaaaggagtagttctacggtgacttgatgttctgctgtgatat

SEQ ID NO: 3610 - DNA, 552 bp, Rattus norvegicus
  Genbank Accession No. NM_031113
  misc_feature (1)..(552): n = a or c or g or t
cttcctttccgatccgccatcgttggtggagcagccgccacgatgcagatttttgtgaagacccttacagggaagaccatcacgctcgaggttgaaccctcggacactatagaaaatgtaaaggccaagatccaggataaggaaggaattcctcctgatcagcagaggttgatctttgctggtaagcagttggaagatggccgtactttgtctgactacaacattcaaaaggagtccactctccatctcgtgctgagacttcgtggtggcgctaagaaaaggaagaagaagtcttacaccaccccaaagaagaacaagcataagagaaagaaggtcaagttggctgtgctgaaatactataaggtggatgaaaatggcaaaatcagccgacttcgtcgggaatgtccttctgatgaatgtggtgctggagttttcatgggtagccactttgacaggcattactgtggcaagtgttgtctgacttactgcttcaacaaaccagaagacaagtagttgtgtatgagttaataaagagaaggaactgatgttaan

SEQ ID NO: 3611 - DNA, 573 bp, Rattus norvegicus
  Genbank Accession No. NM_031114
aagactgcagcgcctcagggcccaggtttcaacagattcttcaaaatgccatcccaaatggagcatgccatggaaaccatgatgcttacatttcacaggtttgcaggggaaaaaaactacttgacaaaggaggacctgagagtgctcatggaaagggagttccctgggtttttggaaaatcaaaaggaccctctggctgtggacaaaataatgaaagacctggaccagtgccgagatggaaaagtgggcttccagagctttctatcactagtggcggggctcatcattgcatgcaatgactattttgtagtacacatgaagcagaagaagtaggccaactggagccctggtacccacaccttgatgcgtcctctcccatggggtcaactgaggaatctgccccactgcttcctgtgagcagatcaggacccttaggaaatgtgcaaataacatccaactccaattcgacaagcagagaaagaaaagttaatccaatgacagaggagctttcgagttttatattgtttgcatccggttgccctcaataaagaaagtctttttttttaagttccg

SEQ ID NO: 3612 - DNA, 1694 bp, Rattus norvegicus
  Genbank Accession No. NM_031122
gcgtcgacgggcttggcatcgggcctccgcagccgcccaccgccagaagcttccagcctcaccactatggatccccgcaaagtgagcgagcttcgggccttcgtgaagatgtgtaggcaggacccgagcgtcctgcacaccgaggaaatgcgtttcctgagggagtgggtggagagcatggggggtaaagtaccacctgctactcataaagcgaagtcagaagaaaacactaaggaagaaaaaagagacaagacgacagaggacaacataaagacagaggagccatcgagtgaggagagcgatctagaaattgacaatgaaggtgtaattgaagcagacactgatgctcctcaggaaatgggagatgaaaatgcagagataactgaggcgatgatggatgaagcaaatgaaaagaagggggctgccatcgacgctctaaatgatggtgagctccagaaagccattgacttgttcacagacgccatcaagctaaaccctcgcttggccattctgtatgccaagagagccagtgttttcgtcaaattacagaagccaaatgctgccatccgagactgtgacagagctattgaaataaaccctgattcagctcagccatacaaatggagagggaaagcgcacagactcctgggtcactgggaagaagcagctcgcgatcttgccctggcctgtaaattggactatgatgaggacgccagtgcaatgctgagagaagtccagcctcgggctcaaaaaattgctgaacatcggagaaagtatgagcgaaaacgtgaagagcgagagataaaagaacgaatagaaagggtgaagaaggctcgagaagagcatgaaaaagcccaaagggaagaagaagccagaagacaatctggatctcagtttggctcttttccaggtggttttcctgggggaatgcctggtaattttcctggaggaatgcctggaatgggaggggccatgccaggaatggcaggaatgcctggactcaacgaaatcctcagtgacccagaggttcttgcagccatgcaggatccagaagtcatggtggctttccaggatgtggcccagaacccatcaaatatgtcaaaatatcagaacaacccaaaggttatgaatctcatcagtaaattgtcagccaagtttggaggtcactcataatgtcaaagcccttgctgaatgaagaacagcttagctcacttactggatgttgcaataatacaaaccagtgtacctctgacctcaccagagagctggggcgcttcgaagataatccctaccctctgcatcatatgcggctgaggcatattacagtggtttgccattagagtgttcattcagataatgttttcctattaggaattacaaacttaaaacatttttcaaccttaaacatattttttaaaaatttaggggatgtcaattcctacatttttcgttactaatctttttgggtttttccttttgaattactgggcaaggaaggtgaatgtggatgatttactgctttcatgaatgaaataaagatttgttagtgggaagcaaataaaacacatttaagttgattgagtcggacatacggttactgcaacatcttgaattgtctttaatgttttacttcacaatgatctatttcagtaaatcttttgggaccaccaaaaaaaaaaaaaaaaaaaaaaaaa

SEQ ID NO: 3613 - DNA, 1777 bp, Rattus norvegicus
  Genbank Accession No. NM_031127
cagcctcaccttttctgatgataactcaaggactcggggatggaaagtcatggggaccctgataggccttggtgccgtgctggcctatcatgaccatcggtgtagggcttctcaggagtcaccacggatatactctaaagaggatgtgcgttctcacaacaaccttcaaactggagtctgggtaactctaggctctgaggtcttcgatgtcacaaaatttgtggacctgcatccaggaggacaatcaaaactgatgctagctgctggaggtcccctagaacccttctgggccctctatgctgttcacaaccagccccatgtacgtgagttactggctgagtataagattggggagctgaaccccgaagatagaatgtcccctcccttggaggcctctgacccttattccaatgaccctatgcgtcatccagccctgaggattaatagccagcgcccctttaatgcagagcctcctcctgaactgcttacagaaagctacatcacaccaaaccctattttctttacccggaaccatctgcctgtacctaacctggacccagacacctatcgcttgcatgtagtaggggcacctggaggtcagtcgctctctctctccttggatgatttgcataagttccccaaacatgaggtcactgtcactctgcagtgtgctggtaaccggcgctcggagatgaataaggtcaaggaagtgaaaggtctggagtggagaacaggggccatcagcacggcacgctgggccggggcacggctctgtgatgtcttagcccaggctggtcaccgactccgtgaaaccgaggcccatgtctgttttgaaggactggattcagaccccactggaactgcctatggggcatccatccctctggctcgggccatggatccccaagccgaggtcctcctggcttatgagatgaatggtcagcctctgcctcgtgaccatggcttccccgtaagggtggtggttcctggtgtggtaggtgctcgccatgtcaagtggttgggcagagtgagtgtggagtcagaggaaagttatagtcactggcagaggcgggattacaaaggcttttctccatctgtggactgggacactgtagactttgatctagccccatcaattcaggaactacccatccagtcagctatcacacagcctcaagatgggacgactgtagaatcaggagaggtgattatcaagggctatgcatggagtggtggtggtagggctgtgattcgagtggatgtgtctatggatggtggactgacctggcaggaagctgagctggagggagaggaacagcatcccaggaaggcctgggcttggcgaatatggcagttgaaagctcacgtgccagctgagcagaaggaattgaacatcatttgtaaagcggtagatgacagttacaatgtgcagccagacactgtggccccaatctggaaccttcgaggcgtgctcagcaatgcctggcaccgtgtccacgttcaggtggttccatgaaagcatggaacagcagtttgtacccaaaggacccctacacctctttaccaacccagccttaatcctcggtgccatagataaacgtttccttcctctactgaggggagaaagcagctctcaagacatcactttcttaccctaccatacctttacttctcatgcctcccctcaggccttgttttgcattgcttagattcttcagatatgtgtgtgatgtatggaatgtgtaaaaactgtacgttatttctttttcttcttccc

SEQ ID NO: 3614 - DNA, 357 bp, Rattus norvegicus
  Genbank Accession No. NM_031129
atggacgtgtttctcatgatccggcgccacaagaccaccatctttacggacgccaaggagtcgagcacggtgttcgaactgaagcgcatcgtcgagggcatcctcaagcggccgccagaggagcagcggctgtacaaggacgaccagctccttgatgatggaaaaactctgggcgaatgtggcttcaccagtcagacagcaaggccacaggccccagccacagtgggcctggcctttcgagcagatgacacctttgaagcgctgcgtattgaacccttctccagccctccggagcttccagatgtgatgaagccacaggattctggaggcagtgccaatgaacaagctgtgcagtga

SEQ ID NO: 3615 - DNA, 686 bp, Rattus norvegicus
  Genbank Accession No. NM_031136
gcggcctctgagcagatcgtctctccttgttcgcccagctcgctcagctccttccagcaaccatgtctgacaaacccgatatggctgagatcgagaaattcgataagtcgaagttgaagaagacagaaacacaagagaaaaatcctctgccttcaaaagaaacaattgaacaagagaagcaagctggcgaatcgtaatgaggcgagcgccgccaatatgcactgtacattccacgagcattgccttcttattttacttcttttagctgtttaacttcgtaagatgcaaagaggttggatcaagtttaaatgactgtgctgcccctttcacatcaaagaatcagaactactgaccaggaaggcctccccccgcctctcccgcccacctgctggcctggctggcagagagggaaaagaacttgcatgttggtgaaggaaaaagctgggtgggagatggtggaattgagagtaaaataaagatgtcttgcaggatataaaatgcagtttaatcagagtgccatttttttttgttcaaacgattttaattattggaatgcacaatttttttaatatgcaaataaagttttaaaacctgaaaaaaaaaaaaaaaaagaaacaacagtcgttatggccataaaacacatcatctgtgattttggagagaaccactggaaagaaagtttgagg

SEQ ID NO: 3616 - DNA, 4566 bp, Rattus norvegicus
  Genbank Accession No. NM_031137
ccagcttgcgtccatggccaccgctgcgaccgaggagcctttccctttccatggtcttctaccaaagaaagagactggggcctcctccttcctgtgccgctacccggagtatgacggacgcggggtgctcatcgccgtcctggacacaggggttgatcccggggccccgggcatgcaggtcacgactgatgggaaaccaaaaatcattgatatcattgatacaacaggaagtggtgatgtgaatactgctacagaagtagaaccaaaagatggcgaaatcactggtctttctggaagagtgcttaagattcctgcaaactggacaaatccttcaggaaaatatcatattggcattaaaaatggttatgacttctatccaaaggctctcaaggaaaggatacagaaagaacggaaggaaaaaatctgggatccaattcacagagttgcgcttgcagaagcttgtagaaaacaagaagaatttgatattgccaataatggctcttcccaagccaataaactaatcaaggaagagttgcagagtcaagtggaattacttaattcttttgagaaaaagtatagtgatccaggccctgtgtatgactgcttggtgtggcatgatggtgagacctggagagcctgtgttgattcgaatgaaaatggggacttgggtaaatctactgtattgagaaactacaaagaggctcaagaatatggttcttttggcacagctgagatgctgaattactctgttaatatttatgatgatggaaacctgctctccattgtgaccagtggaggagctcatggaacccatgtagcgagtatagctgctgggcattttccagaagagcctgaacggaatggagttgctcctggtgctcaaattctatccattaagattggtgatacaaggctaagcaccatggaaacaggcacaggcctcatcagagctatgatagaagttataaatcataagtgtgatcttgtcaactacagttatggagaagcaactcattggccaaattctgggagaatttgtgaagtaattaatgaagcagtatggaaacataatacaatttatgtttcaagtgctggaaataatggtccatgcctttctacagtgggttgtccaggaggaactacttccagcgtgataggtgttggagcttatgtttctcctgatatgatggttgcagagtattcactgagagagaaactacctgcaaatcaatatacatggtcttctagaggcccaagtgctgatggggcccttggtgtgagcatcagtgcaccaggaggtgctattgcttctgtgcctaactggacattgagggggactcagctaatgaatgggacatcaatgtcttcccccaatgcctgtggtggcattgccctggtactttcagggctgaaagcaaataatgttgactatactgttcactcagtcagaagagctctagaaaacactgcaataaaagctgacaatatagaagtatttgcccaaggacatggaattattcaggttgacaaagcttatgactacctcattcagaatacatcatttgctaacagattaggttttacagttacagttggaaataaccgtggcatctacctccgagatcctgttcaggtggctgctccttcagatcatggtgttggcattgagcctgtatttccagagaacacagaaaactctgaaaaaatatccttccagcttcatttagctttaacttcaaattcatcttgggttcaatgtcccagccatttggaactcatgaatcaatgtcggcacataaacatacgtgtggaccccaggggcttaagagaagggttacattatacagaggtatgtgggtatgatatagcatcccccaatgcaggtcctttattcagagttccaatcactgcagttatagcagcaaaagtaaatgaatcatcacattatgatctagcctttacagatgtacattttaaacctggtcagattcgaagacattttgttgaggttcctgagggggcaacttgggctgaagttaccgtgtgttcgtgttcttctgaggtatcagcaaaatttgttcttcatgcagtacagcttgtgaagcagagagcatatcgaagtcatgaattttataagttttgttcccttccagaaaaaggaacactcattgaagcctttcctgttctgggtgggaaagcaattgaattttgtattgctcgttggtgggcaagtctcagtgatgtcaatattgattataccatatcattccatggcatagtgtgtactgcaccacagttaaacattcatgcatctgaaggaatcaatcgttttgatgtccagtcctctttaaaatatgaagatctggctccttgcataactttgaagagctgggtgcaaacactacgcccagtaaatgcaaaaaccagacctttaggatcaagagatgttttgccaaataatcgccagctttatgagatggtcctgacatacagctttcatcagcccaagagcggagaagtaacacctagttgtccactcctttgtgaattattatatgagtcagaatttgacagtcagttgtggattatttttgaccagaacaaaagacagatgggctcaggcgatgcctatccacatcagtattctttgaaattggagaaaggagattatacgattcgattacagattcgtcatgagcaaatcagtgatttggatcgtctcaaagatcttccgtttattgtttcgcataggttgtctaataccttgagcttagatattcatgaaaatcatagccttgcacttctaggaaagaagaaatcaagcagtttgacattaccacccaaatataatcagccattctttgttacttccttacctgatgataaaatacctaagggggcaggacccggatgctaccttgcaggctccttgacattgtcaaagactgagcttggaaagaaagctgatgtgatccctgttcattactatctaatacctccaccaacaaagactaagaatggcagcaaagataaagaaaaggattcagaaaaagagaaagatttgaaagaagagtttactgaagctttacgagatcttaaaattcagtggatgaccaagctggattctactgacatttacaatgaattgaaagaaacatatcctgcttaccttcctttgtatgttgcacgtcttcatcaattagatgctgaaaaggagcggatgaaaagacttaatgaaattgttgatgctgccaatgctgttatttctcacatcgatcagaccgctctcgctgtttacattgccatgaagactgaccccaggcctgatgcagctactataaaaaatgatatggacaagcagaaatctaccctggtagatgccctctgcaggaaaggatgtgctctggcagaccaccttcttcatgcacagccccacgatggggcagcagctggagatgcagaagcaaaagaagaggaaggagaaagtaccttggaatctctatcagaaacctattgggaaactacaaagtggacagatctttttgacactaaggttttgacatttgcatacaagcatgcattagtaaataagatgtacgggagaggccttaagtttgcaaccaaactcgtagaagaaaaaccaacaaaagaaaactggaaaaattgtattcaactgatgaaattactcggatggacccattgtgcgtcttttactgaaaactggctccccatcatgtatcctcctgattattgtgtattctaaaatgggaaccaaaacgttaaatttcgaaagcagaaaattttatagtgaacaaatatatgaacaaatgtgtggcatttctagtctaactaatgcatgtcttcatccactatcgaatactgatcattaaaactctatgtatttatcagagaactcaatggtgtgtggcttcatacatgtaatgtagacagacctctgacatcatgctgctttcctgctgcctcccacacttggctagggagggcagagcctgcctgccagccccaacctgggtggatgcagctgctcactgcaggagaggttttcatctcttaatttttaactgtaaaacgtcatccagtttttattttataaatcaaaaaggttaaaacatgctaaatttttccaattatatagaggccttaaaaatgctacattgggtgtagctaaattatttatttgactaaaaattacgagaacataatttccagacttctaaaaataaattcaattaatgggtatggtggggaggtataaatacatggcaactgggaaaagaaacgtgttaatgtaatcttcactccggagtcacaacaagcaagttgtttttacagcatcctcaagtacacagcatcagaataagttaaaatttcatgtgttggtgccagacagttgaatctatctggttttgtaaagatatacacagtatgtttataacattgaaatcatgtaaaatacatgaataaatgtgcaaaacaacaggcacagcacaccatatgcactctgatacctgttttttataaataaaagtaaatattgaagctaaa

SEQ ID NO: 3617 - DNA, 1737 bp, Rattus norvegicus
  Genbank Accession No. NM_031138
  misc_feature (1)..(1737): n = a or c or g or t
ggggcagctgcggagcatgtcgaccccggcccgtaggaggctcatgcgggatttcaagcgattgcaagaggacccacctgtgggggtcagtggtgcaccatctgaaaacaacatcatgcagtggaacgcagttatatttggaccagaagggacaccctttgaagatggtacttttaaactagtaatagaattttctgaagaatatccaaataaaccaccaaccgttaggtttttatccaaaatgtttcatccaaatgtgtatgctgacggcagcatatgcttagacatcctgcagaaccgatggagccccacgtacgacgtctcctccatcttaacttcaattcagtctctgttggatgagccgaatccaaacagtccggccaatagccaagcagcacagctttatcaggaaaacaaacgggagtatgagaagagggtttcggccattgttgagcagagctggaatgactcataatagacacctggtctgtccacctttccatcgtcgttgtgtataatttacctcccagtaggaaggctagcaagttttaagtgccacgggttttaaggattctgcagagaaaaaagaaaaagtccttcagtttagaacctacaaaagcttgtgtatcttgattaatgtactttttattgcatggtgtgaactaagttattgctgcataaatttgtaatatatcctgtttgtatttttttccaagtgtataatgttggtgtggagttttcatgacagaatatacacattttgtaaatctgtacttttttcaaatattgaatgccttatttttgaattctttagatttttaaattggagaaaagcacttaaagttttttatatatgaatattacatgtaaagctgttaaaatacataacttcagtgcaaaaaaacaggcatctggactcaatggtacctgattaagcccattcctctcagacacttggatgggagacccacacctggactcttttgagcttcagttgatggaattagtgcagcttgagtcagctcaacggggtctctgtgacttgtcctccttcttctgagaccttgcctgtgaaagtattcaaaacacctgcagtattgcctttagcgagttctcatagcaaaggacatagggtgggtgggactggattcgcaggtgaaattaaacctgacagggccgtgtgtttgcattttaatttgatatactcctgaacagtccatctctgacatgctctgccacaacccttctgtgtgtttccttagttactgctaccaaatatccgtgcagccctgcattactgtttccctgggtaccgctcatccccagcccctgaaagccccctggaggtggggaagctgtccccgttgcattcatcttacacacttgcaggctagcgcatgccacacgctctattagtactggtggcttgagtaaataagcaagttcacagctatcgccctctgcagtgcttcaaacactaatgtcttctaacaaatacaactttagtgatcactttgatgccattgaacatgaaacaggtttcttgttgatactagaagatatgtcagaggactcattcaagcctcttctcctgtttttttcgtgacacacatcgataagaagctgattttttttagactaaaatgcataacttaaaatatcttgngaattttttttaaaaggaagggatagaaaaaatatgtcatgaagaaggagaaaaaaaaaaaaaaaaaaaaa

SEQ ID NO: 3618 - DNA, 1796 bp, Rattus norvegicus
  Genbank Accession No. NM_031140
gttcacagccactgcgccctcgctctcttcttgcagatcttgcagccgcagcaagccaggccacctcgtccttcgaagccatgtccaccaggtccgtgtcctcgtcctcctaccgcaggatgttcggtggctccggcacatcgagccggcccagctccaaccggagctatgtgaccacatccacccgcacctacagcctaggcagcgcgctgcgccccagcactagccgcagcctctattcctcgtccccgggtggcgcctatgtgacccggtcctccgccgtgcgcctgcggagcagcatgcccggcgtgcggctgctgcaggactccgtggacttctcgctggccgacgccatcaacaccgagttcaagaacacccgcaccaacgagaaggtggaattgcaggagctgaatgaccgcttcgccaactacatcgacaaggtgcgcttcctcgagcagcagaacaaaatcctgctggccgagctcgagcagcttaagggccagggcaagtcgcgcctgggcgacctctacgaggaggagatgagggagttgcgccggcaggtggatcagctcaccaatgacaaggcccgtgtcgaggtggagagggacaacctggccgaggacatcatgcggctgcgagaaaaattgcaggaggagatgctccagagggaggaagccgagagcaccctgcagtcattcagacaggatgttgacaatgcttctctggcacgtcttgaccttgaacgtaaagtggaatccttgcaggaagaaattgcctttttgaagaagctgcacgatgaagagatccaggagctgcaggcccagattcaggaacagcatgtccagatcgatgtggacgtttccaagcctgacctcaccgctgccctgcgtgatgtccgccagcagtatgaaagtgtggctgccaagaacctccaggaggccgaggaatggtacaagtccaagtttgctgacctctctgaggctgccaaccggaacaacgatgccctgcgccaggcaaagcaggagtcaaacgaataccggagacaggtgcagtcactcacctgcgaagtggatgcccttaaaggcactaatgagtccctggagcgccagatgcgtgaaatggaagagaattttgcccttgaagctgctaactaccaggacactattggccgcctgcaggatgagatccagaacatgaaggaagagatggctcgccaccttcgtgaataccaggacctgctcaatgtaaagatggctcttgacattgagatcgccacctacaggaagctgctggaaggggaggagagcaggatttctctgcctcttccaaacttttcttccctgaacctgagagaaactaacctggagtcacttcctctggttgacacccactccaaaagaacactcctgattaagacggttgaaaccagagacggacaggtgatcaatgagacttctcagcaccacgatgaccttgaataaaaactgcacaggctcagtgcaacggcgcagtaccagcaagaaggaaaaaaaaatcgtatcttagaaaaaagagctttcaagtgcctttactgcagttttcaggagcgcaagatagatctgggatagaaacgagctcagcacataacaactgacacccccaaaaggcgtagaaaaggtttacaaaataatctagttttacgaagaaatcttgtgctagaatactttttaaagtatttttgaataccattaaaactgctttctttttccagaaaatatctgaccaacttgttactgcttcaataaaacttcagaaat

SEQ ID NO: 3619 - DNA, 1128 bp, Rattus norvegicus
  Genbank Accession No. NM_031144
atggatgacgatatcgctgcgctcgtcgtcgacaacggctccggcatgtgcaaggccggcttcgcgggcgacgatgctccccgggccgtcttcccctccatcgtgggccgccctaggcaccagggtgtgatggtgggtatgggtcagaaggactcctacgtgggcgacgaggcccagagcaagagaggcatcctgaccctgaagtaccccattgaacacggcattgtaaccaactgggacgatatggagaagatttggcaccacactttctacaatgagctgcgtgtggcccctgaggagcaccctgtgctgctcaccgaggcccctctgaaccctaaggccaaccgtgaaaagatgacccagatcatgtttgagaccttcaacaccccagccatgtacgtagccatccaggctgtgttgtccctgtatgcctctggtcgtaccactggcattgtgatggactccggagacggggtcacccacactgtgcccatctatgagggttacgcgctccctcatgccatcctgcgtctggacctggctggccgggacctgacagactacctcatgaagatcctgaccgagcgtggctacagcttcaccaccacagctgagagggaaatcgtgcgtgacattaaagagaagctgtgctatgttgccctagacttcgagcaagagatggccactgccgcatcctcttcctccctggagaagagctatgagctgcctgacggtcaggtcatcactatcggcaatgagcggttccgatgccccgaggctctcttccagccttccttcctgggtatggaatcctgtggcatccatgaaactacattcaattccatcatgaagtgtgacgttgacatccgtaaagacctctatgccaacacagtgctgtctggtggcaccaccatgtacccaggcatcgctgacaggatgcagaaggagattactgccctggctcctagcaccatgaagatcaagatcattgctcctcctgagcgcaagtactctgtgtggattggtggctctatcctggcctcactgtccaccttccagcagatgtggatcagcaagcaggagtacgatgagtccggcccctccatcgtgcaccgcaaatgcttctag

SEQ ID NO: 3620 - DNA, 1208 bp, Rattus norvegicus
  Genbank Accession No. NM_031154
cgttcagaccccagcaccatgcccatgacactgggttactgggacatccgtgggctagcgcatgccatccgcctgctcctggaatacacagactcgagctatgaggagaagagatacaccatgggagacgctcccgactttgacagaagccagtggctgaatgagaagttcaaactgggcctggacttccccaatctgccctacttaattgatgggtcacacaagatcacccagagcaatgccatcctgcgctatcttggccgcaagcacaacctgtgtggggagacagaagaggagaggattcgtgtggacattctggagaatcagctcatggacaaccgcatggtgctggcgagactttgctataaccctgactttgagaagctgaagccagggtacctggagcaactgcctggaatgatgcggctttactccgagttcctgggcaagcggccatggtttgcaggggacaagatcacctttgtggatttcattgcttacgatgttcttgagaggaaccaagtgtttgaggccacgtgcctggacgcgttcccaaacctgaaggatttcatagcgcgctttgagggcctgaagaagatctccgactacatgaagtccagccgcttcctcccaagacctctgttcacaaagatggctatttggggcagcaagtaggaccctgacagggtggctttaggagaaagataccaaatctcctgggtttgccaagagccctaaggagcgggcaggattcctgagccccagagccatgttttcttccttccttccattccagtccccaagccttaccagctctcattttttggtcatcaattcctgccaaacacaggctcttaaaagccctagcaactcctttccattagcaaaatagccttctaaagttaaagtgccccgcccccacccctcgagctcatgtgattggatagttggctcccaacatgtgattattttgggcaggtgcaggctccccggcagatggggtctatctggagacagtagattgctagcagctttgaccaccgtagccaagcccctcttcttgctgtttcctgagactagctatgagcaaggtgtgctgtgtccccagcacttgtcactgcctctgtaacccgctcctaccgctctttcttcctgctgctgtgagctgtacctcctgaccacaaaccagaataaatcattctcccctt

SEQ ID NO: 3621 - DNA, 1531 bp, Rattus norvegicus
  Genbank Accession No. NM_031237
ctctgggcgaagcgcggatataagtagctggtggctctgccaccccaccctgcccggatcgcgacggttttcagggttctggaatcagcagggttcctctgaggccttggcgagtggctgatctgctccgtttttgcaaaaggcgcctgtgtctggcagagccggtgtgagaagaagagagaatccttccccgccgccgggataatcaagagttttggccggacctttgagtacacatcgggatagtgagaagcccggcgaaaagcacagactatggcgctgaaacggattaataaggaacttagtgatttggcccgtgaccctccagcacaatgttctgcaggtccagttggagatgacatgtttcattggcaagccacaattatgggacctaatgacagcccatatcaaggtggtgtattctttttgacaattcattttcctacagactaccccttcaaaccacctaaggttgcatttacaacaagaatttatcatccaaatattaacagtaatggcagcatttgtcttgatattctaagatcacagtggtctcctgctttaactatttctaaagttcttttatccatttgttcactgctatgtgatccaaacccagatgaccccctagtgccagagattgcacggatctataaaacagacagagacaagtacaacagaatatctcgggaatggactcagaagtatgccatgtgatgctaccttaaagtcagaataacctgcattatagctggaataaactttaaattactgttccttttttgattttcttatccggctgctcccctatcagacctcatcttttttaattttattttttgtttccctccctccattcattcacatgctcatctgagaagacctaagttcttccagctttggacaataactgcttttagaaactgtaaagtagttacaagagaacagttgcccaagattcagaaatttttttaaaactggagcatgtgtattatgtggccaatgtcttcactctaacttggttatgagactaaaccaatcctcactgctctaacatgctgaagaagccatctgagggggagggggatggatgctgagctgtcacatcaaaggaaacagcattattccagcagcatccattcttgtctaaaccttccactgttagagatttgaggttacatgatatactttatgctcataactgatgtggctggagaattggtattgaattatagcatcagcagaacagaaaatgtgatgtattttatgcatgtcaataaaggaatgacctgttcttgttctacagagaatggaaattggaagtcaaacaccctttgtattccaaaatagggtctcaaaacattttgtaattttcatttaaattgttaggcttggagctattagttaatctatcttccaatactgtttaatatagcactgaataaatgatgcgagttgtcaatggatgagtgatcaactaatagctctcctagtaattgatttatttttcttcaataaagttgcataaacc

SEQ ID NO: 3622 - DNA, 1965 bp, Rattus norvegicus
  Genbank Accession No. NM_031241
gtgcggagctcagactgctggagcctagccacgatgctgtggggttcagtgctaggggccctgctcatggctgtcggttgcctctgcctctccttgctgcccaggcaccgcaggccctgggagccacctctggacaaggggtttgtgccctggctgggtcacaccatggccttccggaagaatatgtttgaattcctgaagggaatgcgggccaagcacggggacgtgttcacactgcagctgggaggccagtacttcacctttgtcatggatcccctctcctttggccccatcattaagagcacgcagaaagtgctagacttcgtgacgtacgctcgggaactggtgttcaaggtgtttgggtaccagtccatggatgaggaccaccagatgctgcacgtagccagtaccaagcatctgatgggacaaggcttggaggacctcaaccgggccatgctggacagcctgtccttggtgatgctaggacccaaaggccggagtctgggtgccaggtcctggtgtgaggacggcctcttccacttctgctacagcatcttgtttaaggctggcttcctgagcttgtttggctgcaccaaggacaaggagcaggacctggatgaggccgatgagctgttcaggaagttccgcagatttgacctacttttccccaggtttgtctactccctgctggggcccctggagtgggtagaagtgagccagctgcagcgtctcttccaccagagactctctgtggagcaaaacctggagaaagacggcataagtaactggttgggcttcatgcttcggtttctgagggagcgagggatggcttcatccatgcaggacaaatttaactttatgatgctctgggcctcccaggggaacacggggcccacctgtttctgggccctcctgttcctgctgaagcatcaggacgcgatgaaggctgtgcgagaggaagccactcgggtcctgggtgaggccaggttggaagccgagacatccttcgctttcactctcagtgccctgaaatgcactccagtgctggacagcgtgatggaagagactcttcgtctctgtgccacccccaccctcctcggggtggtgcaggaggattatgtcctaaagatggccagtgggcaagagtaccagatccgccgtggagataaggtggctctcttcccctatctctcagtacacatggaccccgacatccatcccgagcccacgaccttcaagtacaatcggttcctcaaccctgatggcacccggaaagtggacttctacaagtcaggcaagaagatccaccactacaacatgccctgggggtcgggtgtctccatatgtcccggcaggttctttgcccccagtgagatgaagacctttgtcctccttatggtcatgtactttgactttgaactggtggaccctgacatgcctgtgccccctatcgacccaaggcgctggggcttcggcacctcccagcccagccatgaggtacgctttcgctaccgcctgaagcccatgcagtgagcttagacctgagcacaccctgcagcccagagcggcactgaacacccatcctctggctccaaagcacccctacctctccccggcatccctgccatcttgcctcctagacatctcagaggtctgccatgctccctgtaagatgccatccccccagtggtttctgcctgacccacctctcaggaggaaaacctgtggtcagttcgatttacagctggttacccacccaagtttgactcatcccggaggacagtaccagctcccatgagtcaaacagtatcttgcaaatgctgcctcagcccatcctacctgccttacttgatgcccttactccaaatcctatcgattcagactccagagatgttactcaatggaatcaagccatgtgtgcaattgttaagttcttaatagatatgcactaaaagaaaaggattg

SEQ ID NO: 3623 - DNA, 1591 bp, Rattus norvegicus
  Genbank Accession No. NM_031315
cggctcgaaatggaggcgactctgagcctggggcccgccggccgcagctgctgggatgagccgctgagcatcaccgtgcgcggcctggtccccgagcagcccgtcacgctgcgcgcggccctgcgcgacgagaagggcgcgctcttccgagcccgcgcgctctaccgcgccgatgcccacggagagctggacctggcgcgcgcgcccgctctggggggcagcttcacggggctcgagcccatggggctgctctgggccatggagcccgaacggcctttctggcgcttggtcaagcgcgacgtgcagacgcccttcgtggtggagctggaggtgctggacggacacaaacccgacggcgggcggctgctggcgcgggcggtgcacgagcgtcacttcatggctcccggggtgcggcgggtgcccgtgcgcgagggcagggtgcgcgccacgctcttcctgcccccagaacctgggccctttcctggaatcataaacctttttggagttggaggcggccttctggagtaccgggcgagtctgctggctgggaagggttttgccgtcatggctctggcttattacaactacgacgacctccccaagaccatggaaaccatgcgcattgagtactttgaagaagccgtgaactacctgcgtggccaccctgaggtaaaaggaccaggaattgggctgcttgggatttccaaagggggtgaacttggccttgctatggcctccttcctgaagggcatcacggctgctgttgtcatcaatggctccgtggctgctgttgggaacaccatatgctacaaggatgagactataccccctgtgactatcctgagaaaccaggtcaaaatgaccaaggatggcctcaaggatgttgtagatgctttgcaaagccctctggtagaacagaagagcttcatccctgtggaaaggtctgacacgaccttcctgttcctcgttggtcaggatgaccacaactggaagagcgagttctatgccaatgagatctccaaacgcttgcaggcccacgggaaagagaagccccagatcatttgctacccagaagcagggcactatatcgagcctccttacttcccactgtgcagcgctggcatgcacctcctggtgggtgctaacatcacctttggaggggagcctaagcctcactctgtggcccagttggatgcatggcagcaactccagactttcttccacaaacagttgggtggtaagagtcatggggtgtcccctaaaatataacctgttatgtgatggttttggcaggaaaagtacaaatactttgtaggaatatcagttcagattacttcatctgaacatataaccgcttttggtttacatttttaaaaattaattttagtatcaaaatagtgctgattcaaaggctggaaatatagttcagttgtagagtccttgactgactcatgcaagttcctgggttcaatctccgtgctgtaagggaaaagagcacattttatggaaactgtagctattcaagaaatagtgcctagaatttaaaggaaccatgagtaaacactcttatgtaacttaaaaaaaaaaaaaa

SEQ ID NO: 3624 - DNA, 698 bp, Rattus norvegicus
  Genbank Accession No. NM_031318
gcgctagagggaagatggaagacttccaggcctccgaggagactgcatttgttgtggatgaagtgagcaacattgtaaaggaggctatagaaagtgccatcggcggtaacgcctaccagcacagcaaagtcaaccagtggaccactaatgttgtagaacagactttgagccaactcaccaaactggggaaaccatttaaatacattgtgacctgtgtgatcatgcagaagaatggtgctgggttacacaccgcaagttcctgcttctgggacagctccacggacgggagctgcacagtccgatgggagaacaagaccatgtactgcatcgtcagtgccttcggactgtccatctgaccgcctgactgcctcagcctccggttccagcgtttctagtccatcttaccaccagctatgttgggcggataccttcctcctctttaagttgttctgaggcactcccaaaatgtagagaaataaaccaaatgaccctggccacaggaaccacacgacggacactaggcagatgagcagccacctgtcatccaaggcaggcagtaccagttgtcttaactgtcttctcaaaggtgctaagatctcaagtctgctagtggaaacttctctactttctgaaatgattcagatacactaattttccacactttatacttttgttagaataataaattattcagaatt

SEQ ID NO: 3625 - DNA, 2318 bp, Rattus norvegicus
  Genbank Accession No. NM_031325
ggagcggcgggcggagaggtgtgtggagcttgtggcttgggaggaaggcgctgtccgagagaacgtgatctgcgcggccgctgtgtcctggccttggaagtggttcagtcatggttgagatcaagaagatctgttgcattggtgcgggctacgtcggcggacccacatgcagtgtcattgctcgcatgtgccctgaaatcagggtaacggttgtggatgtcaatgaggccaggatcaatgcatggaattctccaacgcttcctatttatgagcctggactaaaagaagtagtcgaatcctgtcgagggaaaaacctctttttttctaccaatattgatgatgccatcagagaagccgatctagtgtttatttctgtgaacacaccaacaaaaacatatggaatgggaaaaggccgggcggcagatctgaagtatatcgaagcttgtgctcgccgcattgtgcagaactcaaatgggtacaaaattgtgactgagaaaagcacagtccctgtgcgggcagcggaaagcatccgccgcatatttgatgccaacacaaagcccaacttgaatctacaggttctgtccaatcctgagttcttggcagagggaacagccatcaaggacctaaagaacccagacagagtcctgattggaggggatgagaccccagagggccagagagctgttcaggcactctgtgctgtgtacgagcactgggttcccaaggaaaagatcctcaccaccaacacttggtcctcagagctttccaaactggcagccaatgcttttcttgcccagaggatcagcagcattaactccataagtgctctgtgtgaaagcacaggcgccgatgtggaagaggtggcaacggctatcgggatggaccaaagaattggaaataagtttctaaaagccagcgttggttttggtgggggctgcttccaaaaagatgttctgaatttggtttatctctgtgaggctctgaatctgcccgaagtagctcgttactggcagcaggtcatagacatgaatgactaccagaggaggaggtttgcatcacggatcatagacagcctgtttaatacagtgactgataagaagatagctatcttggggtttgcgttcaaaaaggatactggtgataccagggagtcctccagtatctacattagcaaatacctgatggacgagggtgcgcacctccacatctacgaccccaaagtacccagggagcagatagtggtggatctttctcatccaggcgtctcagcggatgaccaagtgtccagactggtgaccatttccaaggatccatatgaagcatgtgatggcgcccatgccctcgttatctgcacagagtgggacatgtttaaggaactggattatgaacggattcataaaagaatgctgaagccagccttcatatttgatggccggcgtgtcctggatgggctccacaatgagctacagaccattggcttccagattgaaacaattggcaaaaaggtatcttccaagagaattccatacactcctggtgaaattccaaagtttagtcttcaggatccacctaacaagaagcccaaagtctagacgtcgcccttttgcctgtgatgatttggtactgcagggtagccagcgtctgtctgatactaagtggtaaatgaactacgtgtttttatggaaacaaaaatatttttgtaatcatcaaatttatactagctatctgggtgttagcatatctagtaattatgagtctagaataatttttatatatttttatattattgtactctcagttactgaatggatggaaaacaatcatgttggtttaaatgtcagtttttataaataaaaatgaaaccttgaattttttagcattacaggttgttacagactgcactgtaataacacaagggaaaggcagtctcatttccctacctgttgtctctgcttatcactaaatgggacttcgaagccgtgaaatcactgtgctaggatggctgatgaaggtctctggacttttgttttaatgagattatgtcattagtggttttagttgtctttgtgtctcccaaaaccactctgtctttctctccatgcgtaactcgggcagtgctttcttttttgaaaattcagcctgaggaggaaatcagtctatggtctagttcgtcctgcctcttagcttctgtacctgcttgtcacatttgcacctatgagtcaagatatgtttgttacctttattttgatttatttctattacaattcaatttttttcctttaattaagaaaaccaataaagtctcatgtgtaaactgg

SEQ ID NO: 3626 - DNA, 3061 bp, Rattus norvegicus
  Genbank Accession No. NM_031330
tgtgaccgcggccaagcccgctcgccttctgcggcgagtagggcctcgcggcgtcatcggcggcgaggagccgctgcggcctggccgaccatgtcggacgcggctgaggagcagcccatggagacgacgggcgccaccgagaacggacacgaggccgcccccgaaggcgaggccccggtcgagcctagccctggcagcggccccgcgactccggcggggtctgtgggcgggaccacggccgccccgagcgggaaccagaacggcgccgaaggcgaccagatcaacgccagcaagaacgaggaggacgcgggaaaaatgttcgttggtggtctgagctgggataccagcaaaaaagatctaaaggattattttactaagtttggagaggtcgttgactgtacaataaaaatggatccgaacactggtcgatcaagagggtttgggtttattctcttcaaagattcttctagtgtggagaaggtcttagatcagaaggagcacagactggatggtcgtgtcattgaccctaaaaaggctatggctatgaagaaggaccctgtgaagaaaatctttgtgggaggtctaaaccctgaagccacagaggaaaagatcagagaatactttggccagtttggggagattgaggccattgaacttccaatagatcccaagttgaacaaaagacggggttttgtttttattacatttaaagaggaagaccctgtgaagaaagttctggagaaaaaattccatactgtcagtggtagcaagtgtgaaatcaaggttgcccagcccaaagaggtgtaccagcaacagcagtatggctctgggggccgaggaaatcgcaatcgagggaaccgaggcagtggtggaggtcagagtcagagttggaatcagggctacggcaactactggaaccagggctacggctaccagcagggctacgggccgggctatggcggctacgactactcgccctatggctattacggctacggccccggctacgactacagtcagggtagtacaaattacgggaagagccagcgacgtggtggtcatcagaataactacaagccatactgagaggcagcaggagcggccgagtgacgacgcacacgctttgtttggacgcggagtgaacacaattatgtaccaaatttaacttggcaaacttttatggcctgtcccatgtgcatcttatttaaaatttcccccggaaatcactctcctgtttactattccagagctctagttgttgtaggcagcgtgtggcgtctcagaggtcagagcggcattagggggctgattttattaccaggttaccctgttctagattggagggtctgcttcctgctgccgctctgcagcctggacctgtggaccctggttgtaaagagtaaactgtatcttaggaaaccagtgtcacctttttcaccttttaattttatattatttgtgtcatacatttccagtaatggaagtgttaattttactgtactttttggtaccttttgggaatctaatgtattgtaaggtattttacacgtgtcctgattttgccacgacctggatattgaagctatccaagcttttgaaataaaaatccctgagagtctggtccactaactccagggactgtgggacagaggaacaaacaagaaagaactcgaggcctcgctgagtggcacgcttgctgagtgctgccacatcccgcaagctgagcaggtatcccaactctgttcctgcccggtagaccacccgaggtgtgagtgtggtcttgtcttccagattcgtaggacagaagctccaggaggaggacccgcccaacatggcatcggagagcgggaagctatggggtggccgatttgcaggctcggtcgaccccaccatggacaagttcaactcatctatcgcctatgaccggcatctgtggaatgtggacctgcagggaagcaaggcctacagcaggggcctggagaaggcagggcttcttcaccaaagctgagatgcagcagatactgcaaggcctggacaaggtggctgaagagtgggcccaaggcatcttcaaattgtaccctaatgatgaagacatccaccttcctcaaggtgctcattgaagccatggtagaccgggcagaggcggagtgtgaagtcctcttccctgggtacacacacttgcagagagctcagcccatccgctggagccactggatcctgagtcacgccgttgcgctgacacgagatttagagagactgaaggaggtgcagaagcggatcaatgtcctgccactgggcagtggggccattgcaggcaaccctctaggtgtggaccgggagttcctctgtgcagaactgaactttggagccattacgctcaacagtatggatgccaccagcgagagagacttcgtggctgagttcctgttttgggcttctctgtgcatgacccatctcagcaggatggcagaagacctgattctctacggtaccaaggaattcaactttgtgcagctctccgatgcctacagcaccggaagcagcttgatgccccagaagaaaaacccagacagcttggagctgatccggagcaaggcgggccgagtgtttgaagtgtctgataccatgacagctgtcctccaagtagccactggagtcatctctacactgcagattcatcgtgagaacatggcacaggcactcagccctgacatgctggctaccgaccttgcctactacctggtccgcaaagggatgccattccgccagcccacgaggcctcagggaaagctgtggtcgtggcagagatgaaaggggtggctctcaaccagctgtcacttcaggagatgcagaccgtcagtcccctgttctcgagtgacgtgaatctcgtgtgggactacagccacagcgtggagcagtacacagccttgggtggcacagcacagtccagtgttgagtggcagatcagccaggtgcgggccctgctgcagatgtagcagccctagattccacccagtcaaagctgcgccccaataaagtggagccctggagaggccgccat

SEQ ID NO: 3627 - DNA, 1334 bp, Rattus norvegicus
  Genbank Accession No. NM_031331
gagcgccaggccaatcggaggtgctgttgtttgtcagtcccggagccggtccgcaaaggaaaggtggcaagatggtgttggagagcactatggtttgtgtggacaacagtgagtacatgcggaatggagacttccttcccacccggctgcaggcccagcaggatgctgtcaacattgtatgtcactcaaagacccgaagcaaccctgagaataacgtgggcttgatcacgctggccaatgactgtgaggtgctgaccacactcacccctgacactggccgaatcctctccaagctccacactgtccagcccaaaggcaagatcaccttctgcactggcatccgcgtggcccatctggctctgaagcaccggcagggcaagaatcacaagatgcgcatcatcgccttcgtgggtagccctgtggaggacaacgagaaggatctggtgaaactagctaaacgccttaagaaagaaaaagtgaatgttgacatcatcaattttggggaagaggaggtgaacacagagaagctgacagcctttgtgaacacattaaacggcaaggacggaactggatcacatctagtgacagtgcctcctgggcccagcctggccgatgctctcatcagttctcctattctagctggggaaggcggcgccatgctgggtcttggtgccagtgactttgagtttggagtagatcccagtgctgatcctgaattggccctggcccttcgtgtctctatggaagagcagcggcagcggcaggaggaggaggcacgacgggctgctgcagcctctgcagctgaggctggaattgccacacctgggactgaaggtgaacgagactcagatgatgccctactgaagatgaccatcagccagcaggagtttggccgtgcggggcttcctgacctaagcagcatgacagaggaagagcagattgcctatgccatgcagatgtccctgcagggagcagagtttggccaagcagaatcaggggacatcgatgccagctcagccatggacacatctgagccagtcaaggaggaggatgactatgacgtgatgcaggacccagagttccttcagagcgtcctagagaaccttcccggtgtggatcccaacaatgaagccattcgaaatgcaatgggctctctggcctcccaggccaccaaggatggcaagaaggacaagaaagaggaagagaagaagtgaggccggagggaggggtagccgagtctgccctggggactgtaaggatggggttggataaagacttagatgtgctctgcggccttgacaacggaataaagcttggagttttccctttgcttc

SEQ ID NO: 3628 - DNA, 2157 bp, Rattus norvegicus
  Genbank Accession No. NM_031332
ctgagctgtcctaccacagcagccgccggaccctaggacagagcacgggccaccgccgcatccacctccagtccaactggatccagctccaaccaccagttttggttcatcttgcctggtgccatgaccttctccgagattctggaccgtgtcggaagcatgggccccttccagtacctgcatgtgaccttgctggccctcccagtcctcggaatagccaaccacaacttgctacagatcttcacagccaccacccctgtccaccactgtcgcccgccccccaacgcctctatagggccctgggtactccccttggacccaaatgggaagcctgagaagtgtctccgcttcgtacatctgccaaatgccagtcttcccaatgacacccagagggccaccgagccgtgcttggatggctggatctacaacagcaccagagacaccattgtgatagagtgggacttggtgtgcagctccaacaaactgaaggagatggcccagtcgatcttcatggcaggcatactggttggaggacctgtgattggagaactgtcagacaggtttggccgcaagcctatcctgacctggagttatctcatgctggcagccagcggctctggtgctgccttcagtcccagcctccctgtctatatgatcttccgattcctgtgtggctgcagcatctcgggcatttctctgagcaccgttatcttgaatgtggaatgggtacccacctcgatgcgggccatctcatcaacatctattgggtactgctacaccattggtcagttcattctgtccggcctggcctatgccattcctcagtggcgctggctacagttaacctcgtctgctcccttcttcatcttctccttgttgtcctggtgggtaccagagtccatacgctggctggttctatctggaaaatactcaaaggccctgaagacactccaacgggtggctaccttcaacggcaagaaggaggaagggaaaaagctcaccatagaggagctgaagttcaacttgcagaaggacatcacctcagccaaggtcaaatatggcttatctgacttgttccgggtgtccatccttcgtcgtgtgaccttctgtctctctctggcctggttttctactggttttgcctactacagtttggctatgggggtagaagaatttggagtcaacatctacatactccagattatctttggtggggttgacatcccagccaagttcatcacaatcctctccttaagttatctgggccggcgcatcactcagagcttcctcctgctcctagcaggaggggccattttggccctcatctttgtgccttcagaaatgcagctcttgagaacagcactggctgtgtttggaaagggatgcctatctggctccttcagctgcctcttcctctacacgagtgagctctaccctacagtcctcaggcaaacaggtatgggtatcagtaacgtgtgggctcgagtaggaagtatgatagccccactggtgaaaatcacgggtgaactgcagcccttcatccctaatgtcatctttgggaccacggccctactgggaggcagtgctgccttctttctgcttgagaccctcaatcggcccttaccggagactatcgaggacatacaaaactggcacaagcaagtccagaaaacaaagcaggagtcggaagcagaaaaggcatcccaaataatcccgctgaagactggtggataggaccctagctgagaacaacagaatcctctttcctggccacaagagactgatcccaagcagtacccttctggagttccttgggcaccttgggggttggggaaagccctaggtgggcccatgctcttggaacaaaaacttctgagagttcagtaaaggtgttctaccctcatcacctccaccatagcctacaacccagacccggcctgctcacagctctagccataggcttcccatactcctgcactcatcctccctgcagcccagccctgccattcttctgtcaacccttgccatattggccatttcctccattgtcccacctccattttccttgagatcccctagcagttctaatggtttcttcttaccttgcccaaactctctccttggtgggaaatttcaataaaccacaatgaagaactc

SEQ ID NO: 3629 - DNA, 4350 bp, Rattus norvegicus
  Genbank Accession No. NM_031333
cacacacacacacacacacacacacccgcacgcacacacacacgcacgcacacacacttctcggcgcgcacgcacgcccgcccttctccccgccccctccccagctccttgatctcccgtctcttttattactcctggtgcgagtccggcggactccgaggcccgctatttgttaccagctcgctctcattggcggggagcgcagagcagcggagaagggggtggggaggggaggggaagggaaggggtggccactgcccggagccgtctccgcgctgctgttggtgccgctgccgccgccgcctccggctcctcgctcggcccctctccgcctccatgtgccggatagcgggagcgccgcggaccctgctgccgcttctggcggccttgcttcaggcatctctggaggcttctggtgaacttgcattatgcaagactggatttcctgaagatgtttacagcgcggtcttaccgaaggacgtgcacgaaggccagcctcttctcaatgtgaaattcagcaactgcaatagaaaaaggaaagttcagtatgaaagcagtgaaccagcagatttcaaggtggatgaggacggcacagtgtacgctgtgagaagcttccctctctctgcagagcaggcaaagttcctgatatatgcccaagacaaagaaacccaggaaaagtggcaggtagctgttaacctgagcctggagcccagcctgactgaggagccgatgaaggaaccacatgaaattgaagaaatagtattccctagacaactcgccaagcacagcggacgtctacaaaggcagaagagagactgggtcatccctccgatcaacttgccagaaaactccagaggaccctttccgcaagagcttgtcagaatcaggtctgatagagataagaacctatctctgagatacagtgtcactgggccaggagctgaccagcctccaacgggcatcttcatcatcaaccccatctctggacaactgtcagtcacaaagcctctggacagagaactgatagcccggtttcacctgagggcacatgcagttgacatcaatggcaatcaagtggagaaccccattgacatcgtcatcaatgtcatcgacatgaatgataacagacctgagtttctgcaccaggtttggaatgggtctgttccagagggatcaaagcctgggacgtatgtgatgactgtcactgccattgatgcagatgacccaaatgccctgaatgggatgctgaggtacaggatcctctcccaggcacccagcaccccttctcccaacatgtttacaatcaacaacgagaccggggacatcatcactgtggcagctggtctggaccgagagaaagtgcaacagtatacgttaataattcaagccactgacatggaaggcaatcccacttacggcctttcaaacacagccacagccgtcatcacagtgacagatgtcaatgacaatcctccagagtttactgccatgaccttctacggagaagtccctgagaacagagtggatgtcattgtagccaacctgactgtcaccgacaaggaccagccccacacaccagcctggaatgcggcatacagaatcagtggtggagaccccacgggaaggtttgccatcctgacagaccccaacagcaatgatgggctagtcacagtggtaaaaccaattgactttgaaacgaataggatgtttgtcctcactgttgctgcagaaaaccaagtgccattagctaaggggatccagcacccacctcagtcgacagccacggtgtctgtgacagttattgatgtcaatgaaaatccttattttgccccaaatcctaaaatcattcgccaagaggaaggcctccacgcaggtaccatgctgaccactctcactgctcaggaccccgatcgatatatgcaacagaatatcagatacacaaagttatctgaccctgccaactggctgaaaatagaccctgtgaacgggcagatcaccactatcgctgttctggacagagagtcgccaaatgtcaaaaacaacatctataatgctaccttccttgcttctgacaatggaatccctcctatgagtggaacaggaacgctgcaaatctatttacttgatatcaatgacaacgcccctcaggtgttacctcaagaggccgagacttgtgaaactccagaacccaattcaattaacatcacagcgcttgattatgacatagaccccaatgcagggccctttgcatttgaccttcccttatccccagtgaccattaaaagaaactggaccatcacccggcttaagggtgattttgctcagctcaatttaaagatcaagtttttggaagctggcatctatgaagttcccatcgttatcacagattcagggaatccccccaagtccaatatttcgatcctgcgtgtgaaagtttgccaatgtgactccaatggagactgcaccgacgtagacaggatcgtgggtgcagggcttggcacgggcgccatcatcgcgatacttctgtgtatcatcatcctgctgatccttgtcctcatgttcgtggtatggatgaaacgccgggataaagagcgccaggccaagcagcttttaatagacccagaagatgatgtaagagataacatattgaaatatgatgaagaaggtggaggagaggaagaccaggactatgacttgagccagctccagcaaccagataccgtggagcctgatgccatcaaacctgtgggaatcagacggctagacgagaggcctatccacgctgagccacaatatccagtccgatccgcagccccacaccctggggatattggggacttcattaatgagggccttaaagctgctgacaatgaccccacggcgccaccatatgactcccttttagtcttcgactatgagggcagcggctccacggctggctccttgagctctctcaactcctccagcagcggcggggaccaggactatgactacctgaatgactggggaccccgcttcaagaagctggccgacatgtatggtggtggtgatgactgaacggcaggacggacttggcttttggacacgtatgaacagtttcacctgatattcccaaaaagcatacagaagctaggctttaactctgtagtccactagcaccgtgcttgctggaggctttggcgtaggctgcgaaccagtttgggctcccagggaatatcagtgatccgatactgtctggaaaacaccgagctcagctacacttgaattttacagtacagaagcactgggattttatgtgcctttttgtacctttttcagattggaattagttttctgtttaaggctttaatggtactgatttctgaaactataaggaaaagacaaaatattttgtggcgggagcagaaagttaaatgtgatacgcttcaacccacttttgttacaatgcatttgcttttgttaagatacagaatgaaacaacaagattaaaaaaaattaactcatggagtgattttgttaccttggggtgggggggtgggggatgagaccacgagataggaaaatgtacattacttctagttttagactttagattttgtttttcactaaaatcttaaaacttacgcagctggttgcagataaagggagttttcatatcaccaatttgtagcaaaattgaattttttcataaactagaatgttagacacattttggtcttaatccatgtacaccttttttattttctgtattttttccacctcgctgtaaaaatggtgtgtgtacataatgtttcatcagcatagactgtggaggagtgcagagaactcggaacatgtgtatgtattatttggactttggattcaggttttttgcatgttaatatctttcgttatgggtaaagtatttacaaaacaaagtgacatttgattcaaccgttgagctgtagttagaatactcaatttttaattttttaattttttaaattttttttaattttctttttgtttgttttgttttggggagggataaaagttcttagcacaaatgttttacataatttgtaccaaaaaaaattacacacacacacacacacacacacacacacacacacacaaataaaaggaaagaaaagtaaaaggggtggcctggtactggcagcactagcaagtgtgtgtttttaaaaaacaaaacaaacaaacaaaaaaaattaataaagagaaaaaaaagaaaaaaaagcttttaaactggagagacttctgaaacagctttgcctctgtgttgtgtaccagaatacaaacaatacacccctgaccccagcgttctgaataaaaagctaattttggatctgg

SEQ ID NO: 3630 - DNA, 470 bp, Rattus norvegicus
  Genbank Accession No. NM_031335
tttctctgctctgcgacccggaccggccagtaaggagaaggtatcatgtcagacaacgaagacaatttcgatggcgatgactttgatgacgtggaggaggacgaagggcttgacgacttggaaaatgctgaggaggagggtcaggaaaatgttgagattctcccatctggtgaacgaccgcaggccaaccagaagcgtatcaccactccatacatgaccaagtacgagcgagcccgagtgctgggcacccgggctctccagattgcgatgtgtgccccagtaatggtggagctggagggggagacagaccctttgctcatcgccatgaaggaactcaaggcccggaagatccccatcatcattcgccgttacctgccagatggaagctatgaggattggggcgtggatgagctcatcatcagcgactgagcagagctgtcaggctgtgccaggcaccatctctatgccca

SEQ ID NO: 3631 - DNA, 1750 bp, Rattus norvegicus
  Genbank Accession No. NM_031352
  misc_feature (1)..(1750): n = a or c or g or t
tgacatggcggtgaacctgagccggaacgggccggcgctgcaggaggcctatgtgcgggtggtcaccgagaaatccccgaccgactgggctctttttacctatgaaggcaacagcaatgacatccgtgtggctggcacaggggagggaggcctggaggagctggtggaggagctcaacagcgggaaggtgatgtacgccttctgcagggtgaaggaccccaactctggcctgcccaagtttgtcctcatcaactggacaggcgagggtgtgaatgatgtgcgaaaaggagcatgtgccaaccacgtcagcaccatggccaacttcctaaagggtgcccatgtgaccatcaacgcacgggctgaggaagatgtggagcctgagtgcatcatggagaaggttgccaaggcttctggggctaattacagcttccataaggaaagcagctgcttccaggatgtggggcctcaggccccagtgggctctgtgtaccagaagaccaatgccgtgtctgagatcaagagagttggcaaggataacttctgggccaaagctgagaaggaggaggagaaccgccgcctggaggagaagcggcgggctgaagaggagaagcagcggctggaggaggagcggcgggagcgggagctgcaggaggctgcccgacgggaacaacgctaccaggaacagcacagatcagctggacccccaagcaggacaggtgaactggagcaagaggtggtttcaaggagcagacaggaatgggagtctgctgggcagcaggccccacacccacgggagattttcaagcagaaggaaagggctatgtccaccacctctgtctccagctctcagccaggcaagctgaggagccccttcctgcagaagcagttcactcaaccagaagcttcctatggccgagagcccacttctcctgtgtcacggcctgcagcaggtgtctgcgaggagctggcacccagcactccgccctcagcccagacagacgatgaacctacatatgaagtgccctccgagcaggagaccctgtacgaggaaccaccaccggtccagcagccaggggctggctccggacacattgacaactacatgcagagccaggacctcagtgggcaaggactgtgcgctcgggccttgtacgactaccaggcagctgacgacacggagatctcctttgaccctgagaacctaatcacaggcatcgaggtgattgacgaaggctggtggcgtggctatgggcctgacggccactttggcatgtttcctgccaactatgtggagctcatagagtgagcgaggtctgttgtccttctctaccacaagtggcttccttgttgcctaagagttaatgttcggcactgttccagaaatgggacttgagtgaggacaaggcttcctctgccctgagtgctcctgttaccccagatatagcagctcccactgctcccccaaatgcttaccgcagcctctaggcccttctgccagccttacacttgactccagtgggaatggcatactgagccaggcttaacctgtgaccagctctggatggcctctgtccagggaacatccgcactgagacattggacatccggggccacactgtacatttgtctgtctttctgtgtggcttctaagggcagcagctgcagctgtttaaaaaactcttgganatcatgaacttaaanaaantgcttcagtgaatcttgaccaatccaataaactgacgtctaaaca

SEQ ID NO: 3632 - DNA, 1818 bp, Rattus norvegicus
  Genbank Accession No. NM_031353
cccagcctcctcgccgcaacccccgccgtagctgccgctgctcccgccgtcaccgcctccgagaacatggctgtgcctcccacatatgctgatcttggcaagtccgccagggatgtcttcaccaagggctacggctttggcttaataaaacttgatttgaaaacgaagtccgagaatggattggaatttactagctcaggttctgccaacacggagaccaccaaagtgaacggcagtctggaaaccaagtacagatggaccgagtatgggctgacgtttactgagaagtggaacacagacaacaccctgggcactgagatcaccgtggaagaccagcttgctcgtggactgaagctgacctttgattcatctttctcgcctaacactgggaaaaaaaatgctaaaatcaagacagggtacaagagggagcatatcaacctgggctgtgatgtggactttgacatcgctgggccctcaatccggggcgctctggtgcttggctatgagggttggctggctggctaccagatgaattttgagacctcgaagtcccgagtgacccagagcaactttgcagttggctacaagacggacgaattccagcttcatactaatgtgaatgatgggacggagtttggtggctccatttaccagaaggtgaacaagaagttggagactgctgtcaatctcgcctggaccgcaggaaacagtaacactcgctttggaatagcagccaagtatcaggtcgaccctgatgcctgcttttcggccaaagtgaacaactccagtctaattggcttagggtacactcagaccctaaaaccaggtatcaaactgacactgtcagccctgctggatggcaagaacgtcaatgcgggtggccacaagcttggtttaggactggaatttcaagcataaatgaatattgtacaatcgttaattttaaactattttgcagcatagctaccttcagagtttagtgtaccttttaatgtcatatgttggggatgcgagagttgattgataccacgttagacctccaggctaaggatgactcggctttaaggtgtttaccgtttcagaggtacagcggaaaccccattccaggaagggtcctttttagctgtaggcgtgggctgggaggagctcctctagagatgccaggctgcaagtggaagctgggaacgtgtggaccctttgtaaatctgtatccagttccgcacatgaaattgtgacttcctgaacatcgaaccccggtgtcccgatcctgtctgctcggaagcatgtacacacctacgtgaaagggacggttttttttttttttttatcggatggtcacgcccggttcccatcgtgccctgttcccatcctagcccatcagttacctgttttacaccaaaagtagtctttagggtgtagttagcaatttcttttgtgccattttagggtggagagggtgggcatgatgaagccagtcattcaggacttaattcttccttgtgttgtggtgtggttttcttcctttcttctgtttttttttttttaattccttttttttttgccattgcaccagagtatgaaatagcttccaggttgtccggctcagagctgggcgggtgattgtggtcacaccctgacaacactagggatctcaacggactcctcttgtagccgcaccactatttttagcagtttaatgggtacattatagagtcttccattttgtgtggaattagctcctccccttcaaatgctgtaattaacatcacttaaaataaaacttgaataaaatactgaaacctcaaaaaaaaaaaaaaa

SEQ ID NO: 3633 - DNA, 1574 bp, Rattus norvegicus
  Genbank Accession No. NM_031502
acaacttcaaagcaaatgaagttcgttctgctgctttccctcattgggttctgctgggctcaatatgacccacacactgcggatgggaggactgctattgtccacctgttcgagtggcgctgggctgatattgccaaggaatgtgagcggtacttagcacctaagggatttggaggggtgcaggtctctccacccaatgaaaatattataattaataatccatcaaggccttggtgggaaagatatcaaccaatcagctacaaaatttgctcaaggtctggaaatgaaaatgaattcaaagacatggtgacgaggtgcaacaatgttggtgtccggatttatgtggatgctgtcattaatcacatgtgtggctcgggcaatagtgcaggaacacacagtacctgtggaagttacttcaatcctaataacagggaattctcagcagttccatactctgcttggtattttaacgataataaatgtaatggagaaattaataactacaatgatgccaatcaggtcagaaattgtcgtctgtctggccttctggatcttgcactcgataaagattatgttcgaaccaaggtggctgactatatgaacaatctcattgacattggtgtagcagggttcagacttgatgctgctaagcacatgtggcctggagacataaaggcagttttggacaaactacataatctaaatacaaaatggttctcccaaggaagcagacctttcattttccaagaggtcattgatcttggtggtgaagcaattaaaggtagtgagtactttggaaatggccgcgtgacagaattcaagtatggtgcaaaacttggcacagttattcgcaaatggaatggagagaagatgtcttacttaaagaactggggagaaggttggggttttgtgcctactgacagagcccttgtgtttgtggacaaccatgacaatcagcgaggacatggtgctggaggagcatccatcctgacattctgggatgctagaatgtataaaatggcagttggatttatgttggctcatccttatggattcaccagagtaatgtcaagttaccgaaggacaagaaatttccagaatggaaaagatgtgaatgactggattggaccacctaataacaatggagtaacaaaagaagtgaccattaatccagacactacttgtggcaatgactgggtctgtgaacatcgatggcgtcaaatcaggaacatggttgccttcaggaatgtagtcaacggtcagccttttgcaaactggtgggataatggcagcaaccaagtggcttttagcagaggaaacagaggattcattgtctttaacaatgatgactgggctttgtcaagcactctacagactggtcttcctgctggcacatactgtgatgtcatttcaggagataaagtcaatggcaattgcactggacttaaagtaaatgttggcagtgatggcaaagctcacttctctattagtaactctgctgaagacccattcattgcaatccatgccgactcaaagttgtaagagtcaaattaaagagatttagattcagcacc

SEQ ID NO: 3634 - DNA, 1178 bp, Rattus norvegicus
  Genbank Accession No. NM_031509
acattaaccaactgtttagcaactcaggcatgactttgcatttttcttctaatctttcatagaaatttctggccactggacactgtgggagcagcttttaccttattggactatctccccttaagtgggaagggcttagtcaaatgcagtaaagagctataaaacaccgagaactcttgatgtgttgtgaaacttagagggagcagctttttaacaagagaactcaagcaattgctgccatgccggggaagccagtccttcactacttcgatggcagggggagaatggagcccatccggtggctcctggctgcagctggagtagagtttgaagaacaatttctgaaaactcgggatgacctggccaggctaaggaatgatgggagtttgatgttccagcaagtgcccatggtggagattgatgggatgaagctggtgcagaccagagccattctcaactacattgccaccaaatacaacctctatgggaaggacatgaaggagagagccctcatcgacatgtatgcagaaggagtggcggatctggatgaaatagttctccattacccttacattccccctggggagaaagaggcaagtcttgccaaaatcaaggacaaagcaaggaaccgttactttcctgcctttgaaaaggtgttgaagagccatggacaagattatctcgttggcaataggctgagcagggctgatgtttacctagttcaagttctctaccatgtggaagagctggaccccagcgctttggccaacttccctctgctgaaggccctgagaaccagagtcagcaacctccccacagtgaagaagtttcttcagcctggcagccagaggaagccattagaggatgagaaatgtgtagaatctgcagttaagatcttcagttaattcaggcatctatggatacactgtacccacaaagccagccttcgaaagctttgcaacaatcgcatattttgactaaatgttgaccctacttattgggaggccaacacgttttctaatgcttctgtgttaattcatatagacatgactgatgaggaattgctgggatgctatttggttgtagttaaaatttgaaatcatgatcacttcctcagatattactttgaatctcaataaaaacttcgcaagctttttaaaaaaaaaaaaaaaaaaaaa

SEQ ID NO: 3635 - DNA, 1719 bp, Rattus norvegicus
  Genbank Accession No. NM_031510
cgggtgtgagcggggttattgaagtaaaaatgtccagaaaaatccatggcggttctgtggtggaaatgcaaggagatgaaatgacacggatcatctgggaattgattaaagaaaagctcattcttccctacgtggaactggatctgcatagctatgacttaggcatagagaatcgggatgccaccaatgaccaggtcaccaaggatgctgcggaggctataaagaaatacaacgtcggcgtcaagtgtgctaccatcacccccgatgagaagagggttgaggagttcaagttgaaacaaatgtggaaatcacccaacggtaccatccggaacattctgggcggcactgtcttcagagaagctattatctgcaaaaatatcccccggctagtgacaggctgggtaaaacccatcatcattggccgacacgcctatggggaccaatacagagcaacagatttcgttgttcctgggcctggaaaagtagagataacctacacaccaaaagatgggtcgcagaaagtgacatacctggtgcatgactttgaagaaggtggtggtgttgccatgggtatgtacaaccaggataagtcaattgaagattttgcacacagttccttccaaatggctctgtcgaagggctggcctttgtatctaagcaccaagaacactattctgaagaagtatgatggacgcttcaaagacatcttccaggagatctatgacaagcaatacaagtccaagtttgaagctcagaagatctggtatgaacacaggctcatagatgacatggtggcccaggctatgaaatcagaaggaggcttcatctgggcctgtaagaactatgatggtgatgtgcagtcagactcagtagcccaaggttatggctcccttggcatgatgaccagtgtgctgatttgtccagatggtaagacggtagaagcagaggctgcccatggcactgtcacacgtcactaccgcatgtaccagaaaggacaggagacgtccaccaatcccattgcttccatttttgcctggtcccgagggttagcccacagagcaaagcttgacaacaatactgagctcagcttctttgcaaatgctttggaagaagtctgcattgagaccattgaggctggctttatgactaaggacttggctgcttgcattaaaggcttacccaatgtacagcgttctgactacttgaatacatttgagtttatggacaaacttggagaaaacttgaaggccaaactagctcaggccaaactttaaggtcaaacctgggcttagggcaaatctttgtggtaactaagtccacagtttacatatttcctttttgttttaataacactcaaggttaaaaacaagaatcattttgtaatttgtttagaagacgaagttgaacttttctatatgtttacagcctattttctttttcatacagttattgccaccttaatgaatgtggtggggaaggtttttttaattgtattttactgtgtaatagcagtctaggaattgtgttagtatctgttcacaattaactgtcactttttatttgctctaatgtaaatgaccaaaatcagaaatgctccaagggtgaacaatcactacactatgtttccccgtaaaggtgaaggagaggctcacctcccctactgtccatgagtgtgaacacagggagcaaaagtgtgcaaatgttgcactgtgtgtggaa

SEQ ID NO: 3636 - DNA, 1329 bp, Rattus norvegicus
  Genbank Accession No. NM_031512
gggcggttcaaggcataacaggctcatctgggatcctctccagtcaggcttccttgtgcaagtgtctgaagcagctatggcaactgtccctgaactcaactgtgaaatagcagctttcgacagtgaggagaatgacctgttctttgaggctgacagaccccaaaagattaaggattgcttccaagcccttgacttgggctgtccagatgagagcatccagcttcaaatctcacagcagcatctcgacaagagcttcaggaaggcagtgtcactcattgtggctgtggagaagctgtggcagctacctatgtcttgcccgtggagcttccaggatgaggacccaagcaccttcttttccttcatctttgaagaagagcccgtcctctgtgactcgtgggatgatgacgacctgctagtgtgtgatgttcccattagacagctgcactgcaggcttcgagatgaacaacaaaaatgcctcgtgctgtctgacccatgtgagctgaaagctctccacctcaatggacagaacataagccaacaagtggtattctccatgagctttgtacaaggagagacaagcaacgacaaaatccctgtggccttgggcctcaaggggttgaatctatacctgtcctgtgtgatgaaagacggcacacccaccctgcagctggagagtgtggatcccaaacaatacccaaagaagaagatggaaaagcggtttgtcttcaacaagatagaagtcaagaccaaagtggagtttgagtctgcacagttccccaactggtacatcagcacctctcaagcagagcacagacctgtcttcctaggaaacagcaatggtcgggacatagttgacttcaccatggaacccgtgtcttcctaaagatggctgcactattcctaatgccttccccaggacatgctagggagcccccttgtcgagaatgggcagtctccaggggaagcctttgtcctctgccaagtcaggtctctcagagccataagaaaaccgtggcacattctggtcaaagaaaacgtgtgtttccctccctgcctctgacaggcaaccacttacctatttatttatgtatttattgattggttgatctatttaagttgattcaggggggtcacgaggcagcattgtcgacagaagaatctagttgtccgtgtgtatgggatgaattgaatttggaccagtgcacagccagcactgagttctttcattgatgctgaaaatgaagagtttcatattgtgtggatgagagtgtttatgaatgaagcacaagcacatcattttgatgagtatgaaataaatgtcactaaaac

SEQ ID NO: 3637 - DNA, 1392 bp, Rattus norvegicus
  Genbank Accession No. NM_031527
aggaggctgcaagagggcgggaggcaggagagggcccggagctggtgggccggagcggcggcgccgccatgtccgacagcgagaagctcaacctggattccatcatcgggcgcctgctggaagtgcagggctcacggcctggaaagaatgtgcagctgacagagaacgagatccgtggtctttgcctcaaatcccgggagattttcctgagccagcctattcttctggagcttgaggcgcctctcaagatctgtggtgacatccatggccagtactatgaccttctacggctgttcgagtatggtggcttccctccagagagcaactacctcttcttgggggactatgtggatcggggaaagcagtctttggagaccatctgcttgttgctggcctataagatcaaatacccggagaatttctttctactacgtgggaaccatgagtgtgccagcatcaaccgcatctatggcttctatgatgaatgcaagagacgatacaacatcaaactgtggaagactttcaccgactgcttcaactgcctgcccattgcagccattgtagatgagaagatcttctgctgccacggaggcctgtctccagacttgcaatccatggagcagattagacgtattatgcggcccacggacgtgcctgaccagggcctgttgtgtgatctgctgtggtctgaccctgacaaggatgttcaaggctggggcgagaatgaccgtggagtctcctttacctttggggccgaggttgtagccaagttcctgcacaagcatgatttggacctcatctgcagagcacatcaggttgtagaagatggctatgagttctttgccaagaggcagctggtgacactcttctcagctcccaactactgtggcgagtttgacaacgctggcgccatgatgagtgtggacgagacactcatgtgttccttccagatcctcaagcccgctgataagaataaggggaagtatgggcagttcagtggcctgaaccccggaggccgtcccatcactccaccccgcaattctgccaaagccaagaaatagcctccatgtgctgccctctgccccagatgacggattatttgtacagaaatcatgctgccatgggtcacactggcctctcaggcccacccatcatggggaacacagcgttaagtgtctttcctttattttttaaagaatcaatagcagcatctaattccccagggctccctcccaccagcacctgtggtggctgcaagtggaatcctggggccaaggctgcagctcagggcaatggcagaccagattgtgggtctccagccttgcatggctggcagccagatcctggggcaacccatctggtctcttgaataaaggtcaaagctggattctc

SEQ ID NO: 3638 - DNA, 2130 bp, Rattus norvegicus
  Genbank Accession No. NM_031528
gagacctcttcctccaacctgcacaacttcccgcttttcacctgggaccggcggagtgacctgcggacttaggcgcgggcaattctgggctgggcgccccgctgaggggccgcccatcggggcgaagggacttgtccctttgcccctctagccgacttgcacggatggcgccgcggctgagtgacgagagccccggtgcaggacttccccctcctggatcttcggccttcgcggggcaagatgtacgaaagtgtagaagtcggggggcttacccccgcccctaaccccttcctagtggtggacttttataaccagaaccgggcctgtttgctccaggagaaggggctccctgccccgggtccctactccaccccactccggactccgctttggaatggctcaaaccactccatcgagacccagagcagcagttcggaagagatagtgcccagccctccctcaccaccacccctgcctcgaatctacaagccttgctttgtttgtcaagacaagtcatccggctaccactatggggttagcgcctgtgagggctgtaagggcttcttccgacgcagtatccaaaagaacatggtgtatacgtgtcaccgggacaagaactgcatcatcaacaaggtgacccggaaccgctgccagtactgccggctgcagaaatgcttcgaagtgggcatgtccaaggagtcggtgcgaaacgaccgaaacaaaaagaagaaagaaacacccaagcccgagtgctcagagagctacacgctgacaccggaggtgggggaactcatcgagaaggtgcgcaaagccaaccaggagaccttcccggccctctgccagctgggcaagtacactacgaacaacagctcagaacaacgtgtctctctggacattgacctctgggacaagttcagtgaactctccaccaagtgtatcattaagactgtggagttcgccaagcagcttcccggcttcaccaccctcaccattgccgaccagattacccttctcaaggctgcctgcctggacatcctgattctgcgaatctgcacgcggtacacacctgagcaagacacaatgaccttctcagatggactgaccctgaaccggactcagatgcacaacgctggctttggccccctcaccgacttggtctttgccttcgccaaccagctgctgcccctggagatggacgatgctgagaccggactgctcagtgccatctgcctcatctgtggagaccgacaggacctggagcagccagacaaggtggacatgctgcaggagccgctgttggaagcactgaaagtctatgtccggaaacggaggcccagccagccccacatgttccccaagatgctgatgaagatcacggaccttcggagtatcagcgccaagggagctgaacgggtgatcacattgaagatggagatccctggttccatgccaccacttatccaggaaatgttggagaactctgagggcttggacactctaagcggacagtcggggggcggaacacgagatgggggtggcctggcccctcctccgggtagctgtagccccagcctcagtcccagctcccacagaagcagcccagccactcaatccccatgaccacctcgacacatggacagccctcacccctgccctggctttctctgccttcctactggccatgtgacctatcagcccagccctgcttgtccttccggacagaactggggaccttccaggggggacaggagggagaaggcagtgactctgtggacagaggcctggaccctgagatggactgctctctcctggcagcctgggctggcatcaggggccaggcattgagccacgtgaggacctgggcctgagccctcacccagcttgccatgtcttcatcaccagcaaacaccagggcctggctccctgtcctccgaactcaagccatcaccccccagttggggaacttccccctgcttcggatggtgacagaagatgcccagggtgggggagaccccctgtacatatcctgcgtaccaacccccagatattaattctcgatggttttgtttttattttaattttttttgttttgtttttttttaataagaattttcattttaagcacattta

SEQ ID NO: 3639 - DNA, 780 bp, Rattus norvegicus
  Genbank Accession No. NM_031530
gcagagacacagacagaggccagcccagaaaccagccaactctcactgaagccagatctctcttcctccaccactatgcaggtctctgtcacgcttctgggcctgttgttcacagttgctgcctgtagcatccacgtgctgtctcagccagatgcagttaatgccccactcacctgctgctactcattcactggcaagatgatcccaatgagtcggctggagaactacaagagaatcaccagcagcaggtgtcccaaagaagctgtagtatttgtcaccaagctcaagagagagatctgtgctgaccccaataaggaatgggtccagaagtacattagaaaactggaccagaaccaagtgagatcagaaactacagtcttctataaaattgcatcaaccctaaggacttcagcacctttgaatgtgaacttgacccataaatctgaagctaatgcatccactctcttttccacaaccacctcaagcacttctgtagaagtgaccagtatgacagagaactagtgtgatttggaatgtgatgccttaagtaatgttaaacttatttaacttattgatattacactattcccttccatgaatactagaaatccttaaatgcaagatgtagatccatttttttatttctctgtgaatcctggttcaacactttcaatgtatgagagatgaatgggtaaactttgtgtttgagagtccaaggtattgtttaaaatattattatggatattcctaattattaaaagaaatatattatttttgtac

SEQ ID NO: 3640 - DNA, 1593 bp, Rattus norvegicus
  Genbank Accession No. NM_031533
atgcccagaaagtggatttctgctctgttcctgctacagataagttactgtttcaaatctgggcactgtgggaaggtgttggtgtggccgatggactttagtcactggatgaatataaaaataatccttgatgaacttgtacagaggggccatgaggtcactgttctgaaaccttcggcttacttttttcttgatccgaaaaaatcgtctgaccttaagtttgaaattttttctacatctatcagtaaagatgagctgcaaaatcatttcataaaacttttggatgtgtggacttatgagttgccaagagatacatgtttgtcatattctcctatccttcaaaatctagtttatgaattttcttatttttatctaagtatttgtaaagacgctgtttcaaacaagcagctcatgacaaaactacaggaatccaagtttgatgttcttttcgcagatcctgtggcttcctgtggggatctgatagctgaactgctccacattccttttctgtacagtcttagcttctctccaggccacaaacttgaaaagtccattggaaaatttatactccctccatcttatgtgcctgtaattttgtcgggactggctggcaaaatgacattcatagacagggtaaaaaatatgatatgtatgctttatttcgacttttggttcgagagacttagacacaaggaatgggacacgttttacagtgagattttgggaaggcccaccaccgtagatgagacaatgagcaaagtagaaatatggcttattagatcctattgggatttgaaatttccccacccaacattaccaaatgttgactatattggaggactccattgcaaacctgctaaacccttgcctaaggatatggaagaatttgtccagagctctggagagcacggtgtggtggtgttttctctggggtcaatggtcagcaacatgacagaagaaaaggccaacgcaattgcatgggcccttgcccagattccacaaaaggttctttggaaatttgatggcaaaaccccagcaacattaggacccaataccagagtctacaagtggctcccgcagaatgacctcctgggtcacccaaaaaccaaagcctttgtaactcatggtggagccaatggcctctatgaggcaatctatcatggaatccctatgattggcattcctctgtttggagatcaacctgataatattgcccacatggtggccaaaggagcagctgtttcattgaatatcaggacaatgtcaaagttagattttctcagtgcactggaggaagtcatagacaatccgttctataaaaaaaatgttatgttgttgtcaaccattcaccatgaccagcctatgaagcccctggacagagctgtcttctggattgagtttatcatgcgccacaaaggggccaagcacctgagaccacttggacataaccttccctggtaccagtaccactctctggatgtgattggattcctgctcacctgttttgcagtcattgcagctcttactgtaaaatgtctcttgttcatgtaccgattctttgtaaagaaggaaaagaaaatgaagaatgagtag

SEQ ID NO: 3641 - DNA, 1748 bp, Rattus norvegicus
  Genbank Accession No. NM_031535
cttagaacctggactcagaccttcataagagccacaaagaaaccaattctgaaccctatcttggctttggatcctggaagagaatcgctaaacacagagcagacccagtgagtgagcaggtgttttggacaatggactggttgagcccatctctattataaaaatgtctcagagcaaccgggagctggtggttgactttctctcctacaagctctcccagaaaggatacagctggagtcagtttagcgatgtcgaagagaacaggactgaagccccagaagaaactgaaccagaaagggagacccccagtgccatcaatggcaacccatcctggcacctggcggatagccccgcggtgaatggagccactggccacagcagcagtttggatgcgcgggaggtaatccccatggcagcagtgaagcaagcgctgagagaggctggcgatgagtttgaactgcggtaccggagagcattcagtgatctaacatcccagcttcatataaccccagggacagcatatcagagctttgaacaggtagtgaatgaactctttcgggatggggtaaactggggtcgcattgtggccttcttctcctttggcggggcactgtgcgtggaaagcgtagacaaggagatgcaggtattggtgagtcggattgcaagttggatggccacctacctgaatgaccacctagagccttggatccaggagaacggcggctgggtaagaaccacgccccttgtgtgtccgccccttgtgtgtctctcctctgtggagatccctaactgccctttttggtctcctggcatggttgttgaagatatcgattattcaggagacattcctggcttactttaataccaggggttaactttgggaatattgatgaccctgtttttaaggaacctgtatttttcattctggctacccttgtggccccgcagtttcatagttttgttccaatttctcggcaaagaaaaacagcctgtgtgtttacttggcttaaaacctaggagagtagcaagttctccctgtgttctgctcactctcacgtaatgggtcaccttggctggggggggaaggtaatataatacctggaggaactgcagagctgataaccccaggctcctgtgtgctcgcatgcatgctattcagaccatttggtcaggcaggagccccactggcttgactggctgaatattgtctgattttagagaaggtggtctgagccaattgtgtttgtgctgtgcccctaagttcattttcaccatggttggcttgtttggggagcccttgctgtgccccaggactttgtacctcactgccctggatcagttggggatctcccagctgctctggcccagtgtttttctgctcagggccctggggcctctttactaaagcactgtttgctgctggcagacacgaaccaggtctgtgaggctccataggaaattaagatttggtgacagactggacgtgggtgtgagtcctgaccctgtcacttaactggccatgtgaccttggtcaggctgacttaccttctgggcctcagcttctcacagactgttgtgactcttaaagataaagcgagcagaagctgacaccagtgagtgccttttcttctgctcacccttgtgctcaccagggtgagatagaggtgagaatgcccttactggtgaccactgtggtaggcatttaccgttcggagggaactccattctggaataggggagaatgcgac

SEQ ID NO: 3642 - DNA, 2497 bp, Rattus norvegicus
  Genbank Accession No. NM_031541
ggaatcccgcgccgaacacgggggcgggctgcccgggccatggcgcataaaacctctggccacctgcagggctactgctgctctggccactgtcaggcacacaccttgctgctcggtttctgtcatctctgtggcctccgtcgcctctgtcgccgtccccttcaggtcctgagcccagcgactctcggccgcgcacgcggacatgggcgtcagctccagggcacgctgggtggccttggggctgggcgttctagggctgctgtgtgctgcgctcggcgttatcatgattctcatggtgccctcgctcatcaagcagcaggtgctcaagaatgtccgcatagaccccagcagcctgtcctttgggatgtggaaggagatccctgttcccttctacttgtccgtctacttcttcgaggtggtcaaccccagcgaggtcctaaatggccagaagccagtagtccgggagcgcggaccctatgtctacagggagttcagacaaaaggttaacatcaccttcaatgacaatgacacggtgtcctacatagagaaccgaagccttcgtttccagccagacaggtcccagggctcagagagtgactacattgtactgcctaacatcctggtcctgggaggggcagtgatgatggaggacaagcccacaagcctgaagctgctaatgaccttggggttggtcaccatgggccagcgggcctttatgaaccgcacggttggtgagatcctgtggggctacgaagatccctttgtgaatttcctcagcaaatatttcccagacatgttccccatcaaaggcaaatttggcctgttcgttgggatgaacgactcgagttctggcgtcttcaccgtcttcacaggtgtccagaatttcagcaagatccatctggtggataagtggaacggcctcagcgaggtcaactattggcattcggaacagtgcaacatgatcaatggtactgccgggcagatgtgggcaccattcatgacacccgaatcctcactggaattcttcagcccagaagcctgcagatctatgaagctcacctaccaggaatcaagggtgttcgaaggcatccccacttatcgcttcacggcccccgatactttgtttgccaacgggtccgtctacccacctaatgaaggcttctgcccgtgccgcgagtccggcattcagaatgtcagcacctgcaggtttggtgcgcccctgtttctctcccagccccacttctacaatgctgaccccgtgctgtcagaagctgttcttggtctgaaccctgacccaaaggagcattccttgttcctagacatccacccggtcactgggatccccatgaactgttccgtgaagatgcagctgagtctgtacatcaaatccgtcaagggcgtcgggcaaacagggaagatcgagccagtagtcctgccattgctgtggttcgaacagagcgggatgatgggtggcaagaccctgaacacgttctacacgcagctggtgctgatgccccaggttcttcactacgcgcagtatgtgctgctggggcttggaggcctcctgcttctggtgcccatcatttaccaactgcgcagccaggagaaatgctttttattttggagtggtagtaaaaagggctcgcaggataaggaggccatgcaggcctactctgagtctctgatgtcaccagctgccaagggcacggtactgcaagaagccaagctgtagggcccagaagacaccacgagccccccaaacctgatagcttggtcagaccagccgcccagtccctacaccccacttctcgaggactctctcagcggacaacccgccagtgccacgtcctgagcccccagatgtcacactgtccacacggcacatagtgtgcggaaacactcagggaccagggacagacccgctgctgagtagagcctgttgggccacaggcgacctcttctaagtgacctgtgagccaggctgtgggaactgtagctgcccctcctgtaggagctggcgccgccggggctcctgactttctccgtctttctccagcaggctgaaagccttagttcccacagaggacacagatctgtcactcctaggggctgggcaaacatcggcctcttgcgtcacggctggacaagcagttccagatcctgaccagtctgcacacacactctggcgctgtatctggcccttctcctacagtctctgctgtcacctgaacactgaattggccactgtaagtggcagcggtggcaggccccctcagggtccttatttttcaggcgtggggtcaaagagagaggtgtgggccgtctacccctggcacctagtatatctcaccagagggtagggtatacagaggcccagcgtcccacaatcgaccccttttttttctactggaagagaaattttatcgtcttttgaaagaaagtcatgactgaagcaataaaccttttcacaaattcaaaaaaaaaaaaaaaaaaaaaa

SEQ ID NO: 3643 - DNA, 1624 bp, Rattus norvegicus
  Genbank Accession No. NM_031543
gccctagcgcacatggcggttcttggcatcaccattgccttgctggtgtgggtggccaccctcctcgtcatatccatctggaagaagatctataacagttggaacctgcccccaggacctttccctcttcccatccttgggaacatttttcagctggatttgaaggatatccccaagtctttcaccaagttggcaaagcgcttcgggccagtgttcacactgcaccttggctcaaggcgcatcgtggtcctgcatggctacaaggctgtcaaggaggtgctactgaaccacaagaatgagttttctggacggggggacattcctgtgttccaggagtacaagaacaaggggattattttcaataatgggcccacatggaaggatgtgcggaggttttccctaagcattctccgagactggggaatggggaaacagggtaatgaggcccgcatccaaagggaggcgcaattcctggtggaggagctcaaaaagaccaaaggccagccttttgaccccacatttctgattggctgcgcaccctgcaatgtcattgcggatatcctcttcaacaaacgtttcgactacaatgacaagaagtgtctgaggctcatgagtttgttcaatgaaaacttctacctgctgagcaccccctggatccagctttacaataactttgcggattatctacgatacctacctggaagccatagaaaaatcatgaaaaatgtgtctgaaataaaacagtacacacttgaaaaagccaaggaacaccttcagtcactggacatcaactgcgcccgggatgtgactgactgtctcctcatagagatggagaaggaaaaacacagccaagaacccatgtacacaatggaaaatgtttctgtgactttggccgacctgttctttgcaggaactgagaccaccagcacaactctgagatatgggctcctgatcctcatgaaatacccagaaattgaagagaaacttcatgaagaaattgacagggttattgggccaagccgcgtccctgctgtcagagacagactggatatgccctacatggatgctgtggtgcatgagatccagagattcatcaatcttgtcccttccaacctaccccatgaagcaaccagagatactgtgttccaaggatatgtcatccccaagggtacagttgtgattccaactctggactccctcttatatgacagccatgagtttccagatccagagaagtttaaacctgagcatttcctgaatgaaaatgggaagttcaagtacagtgactatttcaaggcattttctgcaggaaagcgtgtgtgtgttggagaaggcctggcccgcatggaattgtttctgctcctgtctgctattctgcagcattttaacctgaagtctctggttgaccctaaggatatcgacctcagtcctgtcacagttggctttggcagtatcccaccccaatttaaactctgtgtcattccccgttcatgagacctgaaaacttcctgatatcccttccattgttatcccttaaactatgactgtttttaaaaaacccaagcatatagagttcctatcataaaatgaaaccgaaaaaataaataaaaccttgatgaattgt

SEQ ID NO: 3644 - DNA, 628 bp, Rattus norvegicus
  Genbank Accession No. NM_031545
gcgagacaagagagagcaggacaccatcgcagctgcctggcccatcacttctgcagcatggatctccagaaggtgctgccccagatgattctgctcctgcttttccttaatctgtcgccgctgggaggtcactcccatcccctgggaagtcctagccagtctccagaacaatccacgatgcagaagctgctggagctgataagagaaaagtcagaggaaatggctcagagacagctctcaaaggaccaaggccctacaaaagaacttctaaaaagagtccttaggtctcaagacagcgccttccggatccaggagagacttcgaaattccaagatggcacatagttcaagctgctttgggcagaagatagaccggatcggcgcagtcagtcgcttgggctgtgacgggctgaggttgttttaggaagacctcctggctgcagactccggcttctgactctgcctgcggctcttctttccccagctctgggaccacctctcaagtgatcctgtttatttatttgtttatttatttatttttatgttgctgattttctacaagactgtttcttatcttccagcacaaacttgccacagtgtaataaacatagcctatttcttgcttttgg

SEQ ID NO: 3645 - DNA, 1605 bp, Rattus norvegicus
  Genbank Accession No. NM_031546
agtcattacaacccaggtgtggatgctggagtgtttcctttgtcttctattttaaagatatcttgaaaaaaacctgtcactgtccttttcctgcgaccatgtcttccatcaagattgaatgtgttttaagggagaactacaggtgtggggagtcccctgtgtgggaggaggcatcaaagtgtctgctgtttgtagacatcccttcaaagactgtctgccgatgggattcgatcagcaatcgagtgcagcgagttggtgtagatgccccagtcagttcagtggcacttcgacagtcaggaggctatgttgccaccattggaaccaagttctgtgctttgaactgggaagatcaatcagtatttatcctagccatggtggatgaagataagaaaaacaatcgattcaatgatgggaaggtggatcctgctgggagatactttgctggtaccatggctgaggaaacggccccagctgttctggagcggcaccaagggtccttgtactccctttttcctgatcacagtgtgaagaaatactttgaccaagtggatatctccaatggtttggattggtccctggaccataaaatcttctactacattgacagcctgtcctacactgtggatgcctttgactatgacctgccaacaggacagatttccaaccgcagaactgtttacaagatggaaaaagatgaacaaatcccagatggaatgtgcattgatgttgaggggaagctttgggtggcctgttacaatggaggaagagtaattcgcctagatcctgagacagggaaaagactgcaaactgtgaagttgcctgttgataaaacaacttcatgctgctttggagggaaggattactctgaaatgtacgtgacatgtgccagggatgggatgagcgccgaaggtcttttgaggcagcctgatgctggtaacattttcaagataacaggtcttggggtcaaaggaattgctccatattcctatgcagggtaaactgcagctcttccttgctgtcagaagaaaaagctttgaagacaactggagaattaagggagagaaatcaatgaactttcaatcttgtttttttaatgaggcagtgatattatagcatggttaaactgctttaatttacacttttgattgggtgctggggaataaacctaaagcatggcatattaatgaagaacatatggtaaccatgaactccatctctggattcctttatttacaattttttaaaggttgaatattcgcaccagagaatgacaagtggttttgacaacatactctaggccttctattaaaaacaatctgtagaaaaggagctcaactatcaatcatcctgatcaattgctctggggcttgaaatgagacaatttccattctttttttttgcattccatacttgctgtacataaggcttccaaaaaatcaacgcatagaaacttagttgtaatttataatgattgtgtgacttttcatgtgttattttacaaactaaaatattaccagatgttattcaaacactggagcacaaactgtggttttaactgccacctagtggctatacaaataaatgcatcacattacaaagaaaaaa

SEQ ID NO: 3646 - DNA, 4377 bp, Rattus norvegicus
  Genbank Accession No. NM_031559
agtcggtcgactccgagctcagtgaggacctaaagcagaggactgtggtgcggaggacagtgcttgctccggggagtgcagagcaataggtccccactcaagatggcagaggctcaccaagctgtggccttccagttcaccgtcacccccgatggcattgacctccgcctgagccacgaagccctcaaacagatctgcctgtcggggctgcactcctggaagaagaagttcatccggttcaagaatggcatcatcactggtgtgttccccgcgaatccgtccagctggcttatcgtggtggtgggtgtgatttcatccatgcatgccaaagtggacccctccctgggcatgatcgcaaagatcagtcggaccctagacaccactggccgcatgtcaagccagacgaagaacattgtgagcggcgtcctctttggtacagggctctgggtggcagtcatcatgaccatgcgctactcgctgaaggtgctgctctcctaccacggctggatgtttgcagaacacggcaaaatgagccgcagcaccaagatctggatggctatggtcaaggtcctctcaggtcggaagcccatgttgtacagcttccagacgtctctgccacgcctgcctgtcccagctgtcaaagatactgtgagcaggtacctggaatctgtaaggccactgatgaaggaagaagacttccagcgcatgacagcactggcccaggattttgctgtcaacctcggacccaaattgcagtggtatttgaagctaaaatcctggtgggccacaaattacgtgagtgactggtgggaagaatatatctacctgcggggccgagggccgctcatggtcaacagcaactactacgccatggagatgctgtacatcaccccaacccatatccaggcagcgagagctggcaacaccatccacgccatactgctgtatcgtcgcacattagaccgtgaggaactcaaacccattcgtcttctgggatccaccattccactctgctcagcccagtgggagcgactcttcaatacttcccggatccctggggaggagacagacaccatccaacatatcaaggacagcaggcacattgttgtgtaccacagagggcggtacttcaaggtctggctctaccacgatgggaggctgctgaggccccgagagctggagcagcagatgcagcagatcctggatgatccctcagagccacagcctggggaggccaagctggccgccctcactgctgcagacagagtgccctgggcaaagtgtcggcagacctattttgcacgagggaaaaataagcagtccctggatgcggtggaaaaggcagcgttcttcgtgacgttggacgaatcggagcagggatacagagaggaggatcctgaggcatccatcgacagctacgccaaatccctgctgcatggaagatgctttgacaggtggtttgacaagtccatcacctttgttgtcttcaaaaacagcaagataggcataaatgcagagcactcctgggcggacgcgcccatcgtgggccatttgtgggagtatgtcatggccaccgacgtcttccagctgggttactcagaggatggacactgtaaaggagacaccaaccccaacatccctaagcccacaaggctacaatgggacattccaggagagtgccaggaggtcatagatgcatccctgagcagcgccagtcttttggcaaatgatgtggacctgcattccttcccatttgactctttcggcaaaggcttgatcaagaagtgccggacgagtcccgatgccttcatccagctggcgctgcagctcgcacattacaaggacatgggcaagttctgcctcacatatgaggcctccatgacccggctcttccgagaagggaggacagagactgtacgctcctgcactatggagtcctgcaactttgtgcaggccatgatggaccccaagtcaacggcagagcagaggctcaagctgttcaagatagcttgtgagaagcaccagcacctgtaccgcctcgccatgacgggcgccggcatcgaccgccatctcttctgcctctatgtggtgtccaagtatcttgcagtcgactcacctttcctgaaggaggtattgtctgagccatggaggttgtctacgagccagactcctcagcagcaggtggagctctttgactttgagaaaaaccctgactatgtgtcctgtggagggggctttgggccggttgccgatgacggctatggtgtctcctacattatagtgggagagaatttcatccacttccatatttcttccaagttctctagccctgagacagactcacaccgctttgggaagcacttgagacaagccatgatggacattatcaccttgtttggcctcaccatcaattctaaaaagtaaacccctgagccacacggaaggaaaacggaccctcgtgatacaaaccaaatgaatagatgttgctcctgaccataggacaggcagaaaattgctcttataaaactcagttttccttccagaaggtttaccgtcagtctccctagaacaacagtaggcttcacgtgtgaattgtgaccctactacatccagagatgccttggctccaggaatattgggcacagtcccctgatgtcttttgaatcggctcctactggataaagggatttaaatgctggtgaattcctggattctgggggttgtttcttcacatgtgttggaggtgacagacttcctcagtggtgaccctgtgaatacttgggcgtctgactccacccaggcagtgtgagcatcaccttgtggaaagagaaagtgtcttcagagccagcagaggcaacagctgtagctaacacatctgtaacacactaatggaatggttaggcctggggattaaggttctgctatgagtgacagccactgtccctttggaagttcacatttccaggaagcagagtaccacctccccagtgccaccttcctcacacatcttcaaaacccagtgccttaaagaaggggcccattggcaagcgggaccatagagaagacttagcatctgtgaagcctttgggtggatatgtgaggatgctgcttccccttactggttcctgcataaagatgtccctaagtaagcacttcccccacccctagaaaatgaggtccttggtgaaggcagggatgctggagtctcattgcctgccagttccattaagccacaaaatagcagacatgtgtccacagagggaggggcttggtagtcaaaggctgcatagctggacaacagcgggagagtgtggcttgctgtatttgacagctgttggcaagaggagtgagaccctggtcaccaagtcagacatactgacacaggcagccaaagctcacggagccaggagatatagatagatactggcttgtattctggcagatacacccctgggcttatcttctaatcccacccagtcagattccaaccagagtcaaattccatagaaggctaggtcattttggcgacagactcagggatctcaagtaatgggtgcttttacccacatgccatccctcagtgggagtgcctttcttgaaagcatccaatgggctaaagcagctctaccaagtctgtttggtatttaatgtaaacattagcattaatggagtggtctctcctacctgtcaccatcctgtcctgacaagcttagctctccgaggtttacatcatgtatttattttccagtgcccctttggccttgtttgattcctgcccctgtgccagaagtggcccagaagtgaggggtggggtgaccagcagtgcagagaggtgctggctgaacagttcatgtgtgtcttatgggtatacatgtataaattttgtaatgtaaaaaaaaaaatcatacctaaaagggccaaagttttttttttttttactaaaaccaagaaaacaaaagacaacataaagacataagcagaaacaaactgttgtaagtcagagcggcctgactctcgctgctgtgaccactcaccaacctgtgttactcagagtagcccggctagtgcccgagtgggacattcctctctcaggtttccagtgtccttgctgctcctgagcagttaccaatgcaatttcgcattccttacaaggcagaagagtgggctctcactgtatgtgttcaaaggaggaggtaagactattgtgtatttaatttaatgtggaacaaaatatagtcttaccgcagccaaggttcaaatttggtgttctaatctgtccattgcatgtaaataccatatctgtttggatataaatcttagaagtgcatgtgtgagcgaatgtagctggccattaataaaacattaatactgtctact

SEQ ID NO: 3647 - DNA, 2436 bp, Rattus norvegicus
  Genbank Accession No. NM_031561
cggcattgtaattgtacctgtgagttggcaagaagcaagtgctcttccttgattctgctgcacgaggaggagaatgggctgcgatcggaactgtgggctcattactggagccgttattggtgctgtcctggctgtgtttggaggcattctcatgccggttggagacctactcattgagaagacaatcaaaagggaagttgtccttgaagaaggaaccattgctttcaaaaactgggtgaaaacgggcaccactgtgtacagacagttttgggtctttgacgtgcaaaacccagaggaagtggcaaagaatagcagcaagatcaaggttatacagagaggtccttacacatacagagttcgctatttagccaaggaaaatataactcaggaccccaaggacagcactgtctcttttgtacaacccaatggagccatctttgagccttcactgtctgttggcacagagaatgacaacttcacagttctcaatctggctgtggcagctgcaccacatatctacacaaactcatttgttcaaggtgtgctcaacagccttatcaaaaagtccaagtcttctatgttccaaacacgaagtttgaaggaactcttgtggggttacaaagatccattcttgagtttggttccatatcctataagtaccacagttggtgtgttttatccttacaataacactgtagatggagtttataaagtttccaatggaaaggataacataagcaaggttgccataattgatacctataaagggaaaaggaatttgtcctattgggaaagttattgcgacatgattaatggcacagatgcagcctcctttccacctcttggtgagaagtctcgaacactgaggttcttttcctctgacatttgcaggtccatctatgctgtgtttgaatctgaagtgaaccttaaaggaatccccgtatacagatttgttcttccagccaacgcctttgcctccccactccagaacccagacaaccactgtttctgcactgaaaaagtaatctcaaataactgtacgtcgtatggtgtgctggacattggcaagtgcaaagaagggaaacctgtgtacaattctcttccacatttcctacatgcaagtcctgatgtctcagaacctatcgaaggcttgaatcctaccgaagatgagcataggacatacttggatgtggaacccataactggattcactctacagttttccaaacgactgcaggtcaacatactggtcaagccagctagaaaaatagaagcactgaagaatctgaagagaccttacattgtacctatactgtggctaaatgagactgggaccatcggcgatgagaaagcagaaatgttcagaaaccaagtgaccgggaaaataaagctcctgggcctggttgagatggtcttacttggtgttggagtagtgatgtttgttgcttttatgatttcatactgtgcttgcagatctaagaatggaaaataagtagtggatgagcctacattatgcactagctacatttttggtaaaaccaatctccaaaacgaagacttaagacatgcttgtttttataaaacacacctatctgtagttgaagaaacggtggtgtgcgcgctctctctcttattgcagatatatattcattcatatattgcaataagccacagcatattttgacaagatcaatatgtcactaagcctatatttttaataaaatcttgtattttgttaagtccatcatctgcaactgagtggacttcaatttctgcagaactaattatcttttttggttctgatttactgatttttttttcctgttgccaaatttcaagaatgtatatattctaagaaacgctttgttcctcatcgaagtaaactgttatcatgtctggggtgaccctttcatttatagcaaatgttccttgtgactgtcagcacatgatatgtcatttattacatcattttaaagatttaaggatgaaaaatgaacaattcacatatgaaccattgctaatatattgtttaagcctctccctctctggtgtccttggcaacaacaaggccaggtatcacagatattttttctttttactttcttaacacagagcttaatatgttctgttcctcgccatgaaatgaactatttttagcacattttagctcttgaattttaagtatgttgtcaagttccaggctgcctagctcttttgaaaactgagtaggtttttctctttctgctcagccacaactaatgtaacttcagagagctgttatagtggtaaaagatgtaatttataataaatggattatgatatagaatcttacaaaagctagaattggctttaaatatgtatttgtggtaatatattctgcttttataatcacccagaaataactggtttctaacattaaagatgttcttaaattcc

SEQ ID NO: 3648 - DNA, 1489 bp, Rattus norvegicus
  Genbank Accession No. NM_031563
gaattccgagagccccaccgccgccgccggcctagtcaccatcacacccgggaggagccgcagccgtcgccgccggccccagtcaccatcaccgcaaccatgagcagcgaggccgagacccagcagccgcccgccgcccccgccgccgccctcagcgccgccgacaccaagcccggctccacgggcagcggcgcgggtagtggcggcccgggcggcctcacatcggcggcgcccgccggcggggacaagaaggtcatcgcaacgaaggttttgggaacagtaaaatggttcaatgtaaggaacggatacggtttcatcaacaggaatgacaccaaggaagacgtatttgtacaccagacggccataaagaagaataaccccaggaagtaccttcgcagtgtaggagatggagagactgtggagtttgatgttgttgaaggagaaaagggtgcggaggcagctaatgttacaggccctggtggagttccagttcaaggcagtaaatacgcagcagaccgtaaccattataggcgctatccacgtcgtaggggtcctccacgcaattaccagcaaaattaccagaatagtgagagtggggaaaagaatgaaggatcggaaagcgctcctgaaggccaggcccaacaacgccggccctatcgcaggcgaaggttcccaccttactacatgcggagaccctatgcgcgtcgaccacagtattccaacccccctgtgcaaggagaagtgatggagggtgctgacaaccagggtgcaggagagcaaggtagaccagtgagacagaatatgtatcggggttacagaccacgattccgcaggggccctcctcgccaaagacagcctagagaggatggcaatgaagaggacaaagaaaatcaaggagatgagacccaaggtcagcagccacctcaacgtcggtatcgccgcaacttcaattaccgacgcagacgcccagagaaccctaaaccacaagatggcaaagagacaaaagcagccgattcaccagctgagaattcgtccgctcccgaggctgagcagggcggggctgagtaaatgccggcttaccatctctaccatcatccggtttggtcatccaacaagaagaaatgaatatgaaattccagcaataagaaatgaacaaagattggagctgaagaccttaagtgcttgctttttgcccgttgaccagatccactagaactgtctgcattatctatgcagcatggggtttttattatttttacctaaagatgtctctttttggtaatgacaaacgtgttttttaagaaaaaaaaaaaaaaggcctggtttttctcaatacacctttaacggtttttaaattgtttcatatctggtcaagttgagatttttaagaacgttcgatttttaatttgtaataaagtttacaacttgattttttcaaaaaagtcaacaaactgcaagcacctgttaataaaggtcttaaatggaattc

SEQ ID NO: 3649 - DNA, 650 bp, Rattus norvegicus
  Genbank Accession No. NM_031570
cactccgtaagacgaagccatgtctagctcgagcgccaagattgtgaagcccaatggcaagaagcgagacgagttcgagtctggcatctctcaggcgctgctcgagctggagatgaactccgaactgaagacgcagctgtgggaactcaacatcaccgcggcaaaggaaatcgaagtcggtggtggtcgaaaagccatcataatttttgtaccagttcctcagctgaaatctttccagaaaatggccaagtccggcaaggttcgcgaattggagaaaaagttcagtgggaaacacgtagtcttcattgctcagaggaggattctgcccaagccaacccgaaaaagccgtacgaaaaataagcaaaaggcccagaagccgaccctgacgagcagtgcagaccgacgcatccttgaggatttggtcttcccaagtgaaattgtgggcaagaggatccgtgtgaaactggtaggcagccggctcataaaagttcatttagacaaagcacagcagaacaacgtggagcacaaggtcgaaactttttctggcgtgtacaagaagccactaggcaaggatgttaactttgaattcccagaagtttcagtttaaagaaaaatgactgaataaaatgtcattcataataaaaaaaaaa

SEQ ID NO: 3650 - DNA, 1714 bp, Rattus norvegicus
  Genbank Accession No. NM_031572
atggatccatttgtggtcttggtgctcagtctgtcctttctgcttctcctgtatctatggagaccaagccctgggagagggaagcttcctcctggccctactcctctcccaatttttggaaattttcttcagatagatatgaaggacatccgtcaatcaatatccaatttttctaaaacctatggccctgtgttcactttgtatttcggctcacagcctactgtggtattgcatggctatgaggcagtgaaagaagccctcattgattatggggaagagttctctggaaggggaagaatgccagtttttgaaaaggctactaaaggactgggcattagttttagccgtggaaatgtatggagagccacaagacatttcacagtcaataccctgaggagtttgggcatggggaaacggaccattgagatcaaagtgcaagaggaagcagagtggctagtgatggaactgaagaaaaccaaaggctcaccctgtgatcccaaattcatcataggatgtgctccctgcaatgtcatctgctccattatcttccagaatcgtttcgattataaagataaggattttcttagcttgatagaaaacgtgaatgagtacattaaaattgtgagcactcctgcatttcaggttttcaacgcattccctattcttctggattattgtccaggaaatcataagacacattcaaaacattttgctgctattaagagttaccttttgaagaaaataaaagaacatgaagaatcgttggatgtttcaaatcctcgggacttcattgattacttcctaattcaaagatgtcaggaaaatggcaatcagcagatgaactatacacaagaacatctggcaatcctggtgactaatttgtttattggtggaacagagacatcaagcttaacgctgagatttgcacttttgctcttgatgaagtacccacacatcacagataaagtccaggaagagattggccaagtgattgggagacaccgcagcccctgtatgttggacaggatccacatgccctacacaaatgccatgattcatgaggttcagagatatattgaccttgccccaaatggtttgttgcatgaagtgacctgtgacactaaattcagagactacttcatacccaagggaacagcagtactaacatcacttacatcagtgctgcatgcacgtaaggaattccccaacccagagatgtttgacccaggtcactttctagatgagaatggaaactttaagaaaagtgactacttcatgcctttctcagcaggaaaacggaaatgtgtgggagagggccttgccagtatggagctgtttttgttcctgaccaccattttacagaatttcaaactgaaatctctgtctgatccaaaggacatcgatataaactcaatacgttctgagttttcatcaattcctccaactttccagctgtgcttcattcctgtctaatgaagacctaaaagcagaaatgaagatgaggaaacattctattgtgatgtcttctgacatcacccacagaaatttctatttacaactgtcctagaaataccactatgtactttcttcttcccacagcttatgtcttctaattgcccaaagataacaattctacattatacagtttctgaagttaatgtaaaagattctgagaaaaaaaagtcaattcaaataaaaaaaagttctaatgtga

SEQ ID NO: 3651 - DNA, 2441 bp, Rattus norvegicus
  Genbank Accession No. NM_031576
gatctggtcggtaccggagagcgcaggttgtatcaccaacatgggggactctcacgaagacaccagtgccaccatgcctgaggccgtggctgaagaagtgtctctattcagcacgacggacatggttctgttttctctcatcgtgggggtcctgacctactggttcatctttagaaagaagaaagaagagataccggagttcagcaagatccaaacaacggccccacccgtcaaagagagcagcttcgtggaaaagatgaagaaaacgggaaggaacattatcgtattctatggctcccagacgggaaccgctgaggagtttgccaaccggctgtccaaggatgcccaccgctacgggatgcggggcatgtccgcagaccctgaagagtatgacttggccgacctgagcagcctgcctgagatcgacaagtccctggtagtcttctgcatggccacatacggagagggcgaccccacggacaatgcgcaggacttctatgactggctgcaggagactgacgtggacctcactggggtcaagtttgctgtatttggtcttgggaacaagacctatgagcacttcaatgccatgggcaagtatgtggaccagcggctggagcagcttggcgcccagcgcatctttgagttgggccttggtgatgatgacgggaacttggaagaggatttcatcacgtggagggagcagttctggccagctgtgtgcgagttctttggggtagaagccactggggaggagtcgagcattcgccagtatgagctcgtggtccacgaagacatggacgtagccaaggtgtacacgggtgagatgggccgtctgaagagctacgagaaccagaaaccccccttcgatgctaagaatccattcctggctgctgtcaccgccaaccggaagctgaaccaaggcactgagcggcatctaatgcacctggagttggacatctcagactccaagatcaggtatgaatctggagatcacgtggctgtgtacccagccaatgactcagccctggtcaaccagattggggagatcctgggagctgacctggatgtcatcatgtctctaaacaatctcgatgaggagtcaaacaagaagcatccgttcccctgccccaccacctaccgcacggccctcacctactacctggacatcactaacccgccacgcaccaatgtgctctacgaactggcacagtacgcctcagagccctcggagcaggagcacctgcacaagatggcgtcatcctcaggcgagggcaaggagctgtacctgagctgggtggtggaagcccggaggcacatcctagccatcctccaagactacccatcactgcggccacccatcgaccacctgtgtgagctgctgccacgcctgcaggcccgatactactccattgcctcatcctccaaggtccaccccaactccgtgcacatctgtgccgtggccgtggagtacgaagcgaagtctggccgagtgaacaagggggtggccactagctggcttcgggccaaggaaccagcaggcgagaatggcggccgcgccctggtacccatgttcgtgcgcaaatctcagttccgcttgcctttcaagtccaccacacctgtcatcatggtgggccccggcactgggattgcccctttcatgggcttcatccaggaacgagcttggcttcgagagcaaggcaaggaggtgggagagacgctgctatactatggctgccggcgctcggatgaggactatctgtaccgtgaagagctagcccgcttccacaaggacggtgccctcacgcagcttaatgtggccttttcccgggagcaggcccacaaggtctatgtccagcaccttctgaagagagacagggaacacctgtggaagctgatccacgagggcggtgcccacatctatgtgtgcggggatgctcgaaatatggccaaagatgtgcaaaacacattctatgacattgtggctgagttcgggcccatggagcacacccaggctgtggactatgttaagaagctgatgaccaagggccgctactcactagatgtgtggagctaggagctaccagcctcccacccctcgctccctgtaatcacctaacttctgccgacctcacctctggtggttcctgcctggcctggacacagggaggcccagggactgactcctcctggcctgagtggtgccctcctgggcccctaggcagagcccggtccattgtatcaggcagcccagccccagggcacatggcaagagggactggacccacctttgggtgatgggtgccttaggtcctctgcagctgtacagaaggggctcttctctccacagagctggggtgcagcccccacacgtgattttgaatgagtgtaaataattttaaataacctggcccttggaataaagttgttttcagtaaatt

SEQ ID NO: 3652 - DNA, 2638 bp, Rattus norvegicus
  Genbank Accession No. NM_031579
cacaatcttcaatgagtagacatattcctcagttctgtggtgttctcggtcacacatttatggagtttctgaagggcagtggagactactgccaggcacagcacgacctctatgcagacaagtgaactgtagaaattcattactactccaccaagaagcccccataagagtggatagcctggacacagtcgtgttgaattgaaatctgcagagcattttccaagagctcagacctggatggggtaaacctcagtgcacttcctctgtatcgcctcagtattcctggattgaagagtcactgcttcttgtgaggaggttcatttcattgcccgtttctcccgactcatactcaaagcactgagaatttcaagtggagtatattgaatattgaagtagacttcaggttgttttttggttttgttttggttttttgttttgttttgttttgttttgttttggttttcagtttttgtttggaatcatttctgtattcaattttttaattctttcataaccctattgggtgtttttttaaactaaattaacatggctcgaatgaaccgccctgctcctgtggaagtcacatacaagaacatgagatttcttattacacacaatccaaccaatgcgaccttaaacaaatttatagaggaacttaagaagtatggagttaccacaatagtaagagtatgcgaagcaacttacgacactactcttgtggagaaagaaggcattcatgttcttgactggccttttgatgatggtgcaccaccatccaaccagattgttgatgactggttaagtcttgtgaagattaagtttcgtgaagaacctggttgctgtattgctgtccattgtgtcgcaggccttggcagagctccggtgcttgttgccctagcattaattgaaggtggaatgaaatatgaagatgcagtacaattcataagacaaaagcggcgcggagcttttaacagcaagcaacttctgtacctggagaagtaccgtcctaaaatgcggctccgcttcaaggattccaacggtcatagaaacaactgttgtattcaataaaactggggtgcctgatgccattgccttggaagaggaacttcagatgggacctgatttgttatttacccaatgtgtccacttacctgtggaagctccaggggaatattgaaaaagttttaccaggccacaagcttgacagaattgcaacctctataattgggctatgatcaacacgtttggacacttagcaaaagatttttgctggtcagcatttaaaatgtgcttattatttgtaccaattgacctttcctaaaataaggtattgagtaatgtcattaaatgtactcctgtgccagaatattattagtctataaggaatttagaaggattaggtgccaaaatacccagcacaatacttgtatatttttagcatcatacagaaccaaaattccaagaactaagaactctccagaccttccatggtgtattccttcagtcatttcaaacaccgcagggcttctcttgttatctgcctgctcactctatgtttacatctcccacacttacaccagaacacatcaggtttgcttagctatcttttaagtcttgcaatgattatttaatgtctctgtcttattttgtgctgttttgggaaacctccatttgaaaatcaactttgttacagaagcacatatcttcaataatgtctccagacaaaaagccttatagttaatttaatgtttgcactcgggtgcaacctgacagggagggcctgaacaagaaaggagaggaggctattaaatatttttagtaatatgttgcctttgtcttgtgcagaacatgtagagtatgctctttaatttagtaaatatttttaagacgtagagatacattgttgtagctaaccacttaatcaaaatttctgaaattcttgtgttttccatacctatctgaggttttccaacttgtttgaattatggttttccccttctcttcccaatctcttgcaaaaaagtaaaagtgggatctgctagtgaactgagcagaaatattttatacgccttttgagctatgtaacttaataattggatacttgatcatttgttttattatgtaatcgataaaatggtgatgtgtattaatgttagttcaaccatatatttatactgtctgggaatgtgtggttatagttctgtgggagaaatagtttgtcagtgttcaccagcttgtaaaaacttagtgcgagagcttcaacatctaaataaatgatgaaacgcattcgtcactgaggtcactttgcttaaaattaacttaatttgtagaaaacagtggattcaattattatcatttcagtttatggacaaatttgttagggttaccaagtgcgtttaaaaattgctctttaaaggtctagataattgtgaatcaattgaatgttgggtaccaagggaaaacggtttgtaatagttgatgaccttgatttttaattcaattccaccagtcacttgtagctttatgcagtttccaatccacttttctcatttttaagtttattacttacctgtatatattttgaaattaatttgaacctgcgtatttggcacatgatggcttataaattttaactttc

SEQ ID NO: 3653 - DNA, 1930 bp, Rattus norvegicus
  Genbank Accession No. NM_031589
aaaaacacagctcagcagatccgggcactggagagggagctgcaagcaggagcagtcaagagtgtggtcagaagcaccgtgagtggaccagcagggccggctttttctaccatggcggcccaaggctatggctattaccgcactgtcatattcacagccatgttcggaggctacagcctttactacttcaaccgcaaaaccttctcttttgtcatgccctccttggtggatgagatcgctctggacaaggacgatttggggctcatcacgagcagccagtcggcagcctacgccatcagcaagtttgtgagcggggtgctgtctgatcagatgagtgcccgttggctcttctcctctgggctgctcctggttggtctggtcaacgtagtcttctcgtggagctctacagtaccggcttttgctgctctctggtttcttaatggtctggcacaggggctaggctggcccccctgtgggaagatcctgaggaagtggtttgagccatcccagtttggtacttggtgggctgtgttgtcaaccagcatgaacctggctggaagcctgggacctatcttggcgacaatccttgctcagagctacagctggcgcagcaccctggccctgtctgggtcactgtgtgtggttgtctccttcttctgtctcctgctcatccacaacgaacctgctgatgttggactccgaaatctggaccctcgcccctccaagggcaaaaagggctcgtcaaaggaggagagcaccctacaggacctgctgctgtccccctatctctgggtgctctccactggctacctcgtggtctttggggtaaagacttgctgtacagactggggccagttcttccttatccaggagagagggcagtcggcccttgtgggtagttcctacatcagtgccctagaggttggaggccttgtaggcagcattgcagctggctatctgtcagacagggctatggcaaaggcagggctgtctgtgtatgggaaccctcgccacagcctgttgctgctcatgatggctggcatggcagcatccatgttcctcttccgggtaacagtgaccagcgactctcccaagatctggatcctggtattgggagctgtatttggtttctcttcttatggtcccattgccttgtttggagtcatagctaatgagagtgcacctcccaacttgtgtggtacctctcatgctattgtggggctcatggccaatgtgggtggatttctggctgggttacccttcagtaccatcgccaagcactatagctggagcacagccttctgggtggcagaagtgatctgtatagccagcacagttgtcttcttcttgcttcgaaatatccgcaccaagatgggccgagtatccaagaaggcagagtgaaaagagcactcactatagagcatccccaactgcaacctcattggcaggacacagaaaggaagagaggctgctctggctagaacagagcctttacatatctgtgtctacactgtctctctggacctccgtggtgctgcaagttaccagtggctaatgaggtcctatgctctatttaaatgatgtttggttttaggctccattggcttctgtttctaccttctagcagacagacaactcctaaattcagggtgtctcctatacccctcttcctctcctgagtccccatctcctagtgaggtggttctatctctgcagctgcagaatattaatggcctgtggtttctgctgtaccccaaggcttcttgttaggggtcaacactgttgccaatacctcagtccctaagggaggagaggaggccaccactctcatcagttacctggggacaaaagggaggaatgtagagagcaaactgtcttgtatagactaataaaactagatttgatactaaaaaaaaaaaaaaaaaaaaaa

SEQ ID NO: 3654 - DNA, 2622 bp, Rattus norvegicus
  Genbank Accession No. NM_031593
gcgcgctgcaggaagagtggcagaccgaagcggcctcgggctgcaaacggaggggcgctcgcgcggcgacggctgcagggctgacaccgctcagggcaggggggtcccaggcggctggaacgctctattctgaactgtgagtggatgatgctgttgcagccaagctgctgaacacactccgtggactcttccctgctgtgccttgcccatcggccgagataaaatggaagactcctacaaggataggacttcactgatgaagggcgccaaggacattgccaaagaggtgaagaagcaaacagtgaagaaggtgaaccaggcagtggaccgggcccaggatgaatacacccagcggtcctacagtcgattccaggatgaagatgatgatgatgactactacccacctggagaaacctacagtggggaggccaatgatgatgaaggctcaagtgaagccactgagggtcacgatgaagaagacgagatctatgaaggggaataccagggcatccccagcacgaaccaagggaaggacagcatagtgtctgtaggacaacccaaaggagatgagtacaaggaccgcagagagctggagtcagagaggagggctgatgaggaggagctcgcccagcagtatgagctgataatccaagagtgtggccatggccgtttccagtgggcccttttcttcgtcctgggcatggctctcatggcagacggcgtggaggtgtttgtggtgggctttgtgttacccagtgcagagacagacctatgcataccgaattcaggatctggatggctaggcagcatagtgtacctcgggatgatggtgggggcgttcttctggggaggactggcagacaaagtgggaaggaagcagtctcttctgatttgcatgtccgtcaacggattctttgccttcctttcttcatttgtccaaggttacggcttctttctcctctgtcgtttgctttcaggattcgggattggaggcgccattcccactgtgttctcctactttgctgaagtcctggcccgggagaagcgcggtgagcacctcagttggctctgcatgttctggatgattggcggtatctatgcttcagccatggcctgggccatcatcccccactatgggtggagcttcagcatgggctcagcctaccagttccacagctggcgcgtcttcgtcatcgtctgtgccctcccgtgcgtctcctcggtggtggccctcaccttcatgcccgaaagccctcggttcttgctggaggtaggaaaacatgatgaagcctggatgattctgaagctaattcatgataccaacatgagagcccggggccagccagagaaggtcttcacggtaaataaaatcaagactcccaagcaaatagatgagctgattgagattgagagcgacacaggaacctggtaccggaggtgttttgttcggatccgcacagaactgtacggaatttggttgacttttatgagatgcttcaactacccggtcagggaaaacaccataaagcttacgattgtttggttcaccctgtcctttgggtactatggactgtccgtttggttcccagatgtcattaaacacctccagtctgacgagtacgccctgctgactcggaatgtgcagaaggataaatatgcaaactttagcattaacttcaccatggaaaaccaggtccacaccggaatggaatatgacaatggcaggttcctcggagtcaaattcaaatcggtaaccttcaaggattcagtgtttaagtcctgcacctttgacgatgtgacctcagtcaacacctacttcaagaactgcacgtttattgataccctttttgagaacacagattttgagccctataaattcatagacagcgagtttcaaaactgctcgtttcttcacaataagacgggatgtcagattacttttgacgacgactacagtgcctactggatttactttgtcaactttctcgggacattggcagtgttaccaggaaatatcgtgtctgctctcctgatggacaggatcgggcgcttaacgatgctaggtggctccatggtgctctcggggatcagctgcttcttcctgtggtttggcaccagcgaatccatgatgataggcatgctgtgcttgtacaacggactgaccatctcagcgtggaactctcttgatgtagtcacggtggaactataccccacagaccggagagcaacgggctttggcttcttgaacgcactctgtaaagcagcggccgtcctgggaaacttaatattcggctccttggtcagcatcaccaaagcaatccctatcctgctggcttccaccgtgctcgtgtgtggaggactcgtggggctgcgcctgcccgacacaagaacccaggttctgatgtgacaaaagccattctcttctctcaccatgggtcagccctattgcctgactcaaggcttcagagtttttatgtatagaaaggtggccaagtatcagaactcaaacttttgctgtgacgtaaatgtagctgtgtattgtccccgccagtgtgatttgcagggtcctccccctcccccgcgccttgttatcttttcctaattgtgatgttcctgcttccg

SEQ ID NO: 3655 - DNA, 4510 bp, Rattus norvegicus
  Genbank Accession No. NM_031599
gcggaaccctcgctcaatgggcgatgtctgtacaaggctgtcactcaggtggcagtggctgagacgtggccgggcagctctgctgctgcggcgtgaagtcgagaggcgtcggggtccgtggtgcgcgctttcggtgctccaaggctcctagcggcgagacgggccggcgccgaccgcagggtctccatgcccgctcgtggggcgggccgctgatggagcgcgccacccagccccgaccgcgcgcgctgctgctgctgttcctgctgctgggctgcgcggcggggatctcagcggtcgcgcgcgcccgcagcttgcttgctcccacatcggatacggcatttggcttgggggcagcagccgcccctacttcagccgcgcgggtgcctgcggtggctacggccgaagtgaccgtggaagacgccgaggcattgcccgctgcctccggcgaacaggagtcacgcgcgaccgagtccgatgacgacgtggaactgcggcctcgcggcaggtccttagtaatcatcagcactttagatggacgaattgccgcactggatgccgagaatcatgggaaaaagcagtgggatttggacgtgggatctggttccttggtttcatctagccttagcaagccagaggtgtttgggaacaagatgatcattccttccctggacggagacctcttccagtgggaccgagaccgagagagcatggaggccgtccctttcactgtggagtcccttctcgaatcttcatacaagtttggagatgatgttgttctggttggaggaaagtctctgaccacatacgggctcagtgcatatagtggaaagctgaggtatatctgttctgccttgggatgtcgccgatgggatagtgatgaaatggaagaagaggaagacatcttgcttctgcaacgcacgcagaagactgtgcgagctgtcgggcctcgaagcggcagtgagaagtggaatttcagtgttggccactttgaacttcggtatattccagacatggaaactagagccggattcattgaaagcacctttaaactgggtggaaacaaagaagactctaaaatcatttcagatgtggaagaacaagatgtggacacagtgataaaagtttccgttgctgattggaaggtcatggcgtttagtaagaagggaggccgcctagaatgggagtaccagttttgtactcccattgcgtctgcctggctggtgagggatggtaaagtcatccccatcagtctgtttgatgacacaagttacacagccaatgaggaagttttggaagatgaagaagacattgtagaggctgctcggggagccacagagaacagcgtgtacttagggatgtacagaggccagctgtacctgcaatcatccgtcagggtctcggaaaagttccctacaaggccgaaggccttggagtctgtaaatggagaaagtgccattattcctctgccgacgatcaaatggaagcccttaatccattctccgtctaggactcctgtcttggttgggtctgatgaatttgacaagtgtctaagtaatgataaatattcccatgaagaatacagtaatggtgcgctttcaatcctacagtatccatatgacaacggttactatctgccttattacaagagagaaaggaataagcggagcacgcagatcacggtcaggttcctggacagcccgcactacagcaagaacatccgcaagaaggaccccatcctcctcctgcactggtggaaggaaatatttggaacgatcttgctttgcattgtggccacgacctttatcgtgcgcaggcttttccatcctcagccccacaggcaacggaaggagtctgaaactcagtgccaaactgaaagtaaatacgactctgtgagtgctgataacagcgacaacagctggaacgacattaaacactcaggatacgtgtcccgatacctaacagattttgagccaattcagtgcatgggtcgaggcggctttggcgttgtctttgaagctaagaacaaagtagatgactgcaattacgccatcaagaggatccgtctcccaaacagggagctggcacgggagaaggtaatgcgggaagtcaaagccttggctaagctggagcacccaggcatcgtgaggtatttcaatgcgtggctggaaacaccaccagagaagtggcaagaggagatggatgaaatctggctgaaggacgaaagcacagactggccactcagctcccctagcccaatggatgccccatctgttaagatccggcagatggatcctttctctacaaaagaacagattgaagtcatagctccttctcctgaaagaagtcggtctttctcagtgggcatttcctgtggccggacaagctcatctgagagccagttctctcccctggagttctcagggacagactgtggagacaacagtgactcagaggacgcagcccacaacctccaggacagctgcctgacagattgcgacatggaagatggtacagtggacggcgatgatgagggacactcctttgaactttgtccttctgaagcttctccctataccaggtcaagggagggaacgtcctcttccatagtgtttgaagactctggctgtgataatgcgtccagtaaggaggaccccagaatgaatcggctgcataatggccaccattacgttaataagctaactgagttcaagcactccagcagcaggtcttcttccgaagccaccttgtctacctctcctaccaggccaaccaccctaagtttagatttcaccaggaacacggtggaccggctccagcccagctcccccaaggtgtacctgtacatccagatgcagctgtgcaggaaggagaaccttaaagactggatgaaccggcgctgcagcatggaggacagggagcacagagtgtgcctgcacatctttctgcagatcgcagaggcagtgcagtttctgcacagcaagggactcatgcacagggacctcaagccttccaacatattcttcacaatggatgatgtggtcaaagttggggactttgggctagtgactgcaatggaccaggatgaagaagagcagacagtactgactccaatgccagcctatgctacacacacgggacaagtcgggaccaagctgtacatgagcccagaacagattcatggaaacaactactcccataaagtggacatcttctctttaggcttgattctgtttgaactcctttacccattcagcactcagatggaacgagttaggactttaactgatgtaagaaatctcaagtttccaccactgttcactcagaaatatccccaagagcatatgatggttcaagacatgctttctccatcccccatggagcggcctgaagccacagacatcattgaaaatgctgtgtttgagaacttggagtttcctgggaaaacggttctgagacagcggtcccgctccttgagttcatccggaactaaacattccagacagcccagcagcacattcagcccactgcctggcaactagtctccagctgtgcctgcggccctcagaggtggcacaggacgggcaccttgaggaatgtggctctccgtggtggcggactcattttatgctttgatcaacttgacttaggaccaatttttctaagtcagactggattatgggcctaacccagtttgatcttaactaaacttcaaggaaagggctatataaatgacaagtggatttgtttcttgttggtgtcccaaaactagctggtcaagctacagaaccttcacttttcaccaggaggcagaagacagcctgaaaccatctgaactggaaatgactttaaagcacaaaggtgtgaaagaccctctcacatgggaactacatgttctagaaacgtgctttctagaaatacaagggtgattatggaagcgactgttataaagctgactccatttttgtccctggtgagcatgtgacccatctgcactattttggaaggcgcagcacaggctgggtggccatttatgtcagtagtgccatagtctgcagcagtgaataacttcactttttaggtggtctagggagcacggtgagctttttgtacttttttatctccagtaatgggaaaatgaagctttttaggtattggtcaaaagatctgattggagggtttaaaaagaagtgtagtaagaaatgggtcacctattacacctaacttattccattatggagtttttgtcctagtagaagtctaccttatgtgtaatactacaagtcagcatatcccccaaactgattataggtaagtttaatcatctcaacttgctaacatgttctcatttttcctgtaaatatctttattttttatttataaaaattctgaaatcaatccatttgggttggtggtgtacaggatgcacataagtgtgttaactattatgacttctttcaagtctaaatgatttaataaaacgtttttaaattataaaaaaaaaaaaaaaaaa

SEQ ID NO: 3656 - DNA, 1771 bp, Rattus norvegicus
  Genbank Accession No. NM_031603
ctaaagcggacgcggagcgagaagctgagagagtcggagacgctatccgcttccatccgtcgtgcagaccctgccggagccgctgccgctatggatgatcgggaggatctggtgtaccaggcgaagctggcagagcaggccgagcgatacgacgaaatggtggaatcaatgaagaaagtagcaggaatggacgtggagctgacagttgaagaacgaaaccttttatctgttgcatataaaaatgtgattggagccagaagagcatcctggagaataatcagcagcattgaacagaaggaagaaaacacgggaggagaggacaaattaaagatgattcgggagtaccggcaaatggttgaaactgagctcaagttaatctgttgtgacattctggatgtactggacaagcacctcattccagcagctaacactggcgagtccaaggtttcctattattacatgaaaggggactaccacaggtatctggctgagtttgccacaggaaacgacaggaaggaggcagcagagaacagccttgtggcttacaaagctgctagtgacattgcgatgacagaacttcctccaacgcaccccattcgtttaggtcttgctctcaacttttccgtattctactatgaaattcttaattcccccgaccgtgcctgcaggttggcaaaagcagcttttgatgacgcaattgcagaactggacacgctgagtgaagaaagctataaggactccacactcatcatgcagctgctacgtgataacctgacgctgtggacctcagacatgcagggcgatggtgaagagcagaataaagaagcgctgcaggatgtggaagatgagaatcagtgagacgtaataaagccaacaagagaaaccatctctgactaccccaccccacccctgcccttggaagttccccattgtcactgagaaccaccaaatttgactttcacatttggtctcagaatttaggttcctgccctgttgttttgctttcgttttcttttttttctcccctccccctttttaaaacaaacagttttcagaagttcttaagccaagagtgaatttctgtggattttactggtcccagctttaggttctttacgacactaacaggactgcatagaggctttttcagcattactgtattgtctccggccacatgtggcaagatcatcattagaaatggaaatgacatttgagagccattagacttctaggtgatgcatctaagaaagattaatcacacaatagaggctattgcgctgtcatttttcctttttttaattgttaaattgaattttataccaatgtttaaacttaaattgggtgttagcttgaggtgttttgggggagtttgcggtaatggttttgctgtaacgtgtgtttggaactctgctgaagggctgctgaaaagcacggtgctggtaacagtccaacagtccgcggctgctcattcttgccgactcctccctctgacgcaggttagcattgaaggtggtatggaagcctgcatgcgtgttcaactcttcctcttccctcctcctcggcctccctcatcccttcctccttcgctcgctcaacctcttttgttcagtatgtgtaacttgaagctaatttgtactactggatatctgactggagccacagatacagatctgtattgttcttactgaaacacagcatggaattaacattaaacttaaataaaacaaacctaaattaaagatgcacaaaaaaaaaaaaaaaaactttagag

SEQ ID NO: 3657 - DNA, 3360 bp, Rattus norvegicus
  Genbank Accession No. NM_031614
gccttgcagcggcgcgggcaaacggagaggccgcgggaggcgcgaagccggcagaaggcgagggagagcggagggcggccatggtccagccctgaagccaaacaaaaaaggcctacttcgaaagctgtcaacaatgaatgactctaaagatgcccctaagtcctatgacttcgacctgatcatcattggaggaggctcgggaggcctggcggcagctaaggaggcagccaaatttgacaagaaggtgatggtcttggacttcgtcacaccaactcctctcggaacgaatgggggtctcgggggaacgtgtgtgaacgtgggctgcatacctaaaaaactgatgcaccaggcggctctgttaggacaagctctgaaagactcacgcaactatggctggaaactcgaggacacagttaagcatgactgggagaaaatgacagaatctgtgcagaatcatatcggctcgctgaactggggctaccgagtagctctccgggagaagaaggtcgtctatgagaatgcttacgggaaattcattggtcctcacaaaattatggcaacaaataacaaaggtaaagaaaaagtttactcagcagagcggttcctcattgccaccggtgaaaggccacgctacctgggcatccctggagacaaagagtactgcatcagcagtgacgatcttttctccttgccttactgcccggggaagaccctagtggttggcgcgtcctatgtcgccttggaatgtgcaggattcctggctggtatcggcctcgacgtcactgtaatggtgcggtccattctccttagaggatttgaccaggacatggccaacaaaattggtgaacacatggaagagcatggtatcaagtttatcaggcagttcgtgccgacgaaaattgaacagattgaagcagggacaccaggccgactcaaggtgaccgctaaatccacaaacagtgaggagaccatagaagacgaatttaacacagtgttgcttgcagtaggaagagattcttgtacaagaactattggcttagagaccgtgggcgtgaagatcaatgaaaagaccgggaagatacctgtcacggatgaggagcagaccaatgtgccttacatctacgccattggtgacattctggaggggaagctggagctgacccccgtggccatccaggcggggagattgctggctcagaggctgtatggcggctccactgtcaaatgtgactatgacaatgtcccaacgactgtgtttactcctttggagtatggctgctgtggcctctctgaagaaaaagctgtagagaaatttggggaagaaaatattgaagtttatcacagtttcttctggccattggaatggacagttccatcccgggataacaacaaatgttatgcaaaagtcatctgtaaccttaaagacaacgaacgtgtcgtgggcttccacgtactgggtccaaatgctggagaggtgacgcaggctttgcagccactcaagtgcgggctgaccaagcagcagctggacagcaccattggcatccacccggtctgtgcagagatatttacaacgctgtcggtgactaagcgttctgggggagacatcctccagtctggctgctgaggttaagccccagtgtggatgctgttgccaagactacagaccattgcttgcttccttgtccacacccaggtgaagttcaggaaggctcttgggttcttggcaccaattcaaggtgctatcctaaggccaccaggtccctgggatcttgtgggtaggaggtggcaggtagaagaaggctgcagcatcgcactggggtcaccatgacggactcagactgacattcggcagagcatcacggtgcgtccatgaagtcactagcctcaagcccaagtggtgggcagtgacagaaagctgtcgatctgttgggttcaacctttccctgtagactgttttagtctcgccttcaagctatgtaatgtcaattctgttttttcttttctccatggggttaatgatactagaggtagggaatgttagcaatcagtttttgtcatggctggactatccacagcacggtcgttactgtgtggaagggggtcagatggcttatgagagccaaaccagtttatcctgagaaagacgaattaccctgtggctaaaatacactgtttttactaacctgtgtagcattgtcccctttaataagtttaggtcttctgtccaaactgagaaaaaccatggtcactttggcaaatttccggcagtgtgtgtccctgccgctgcttagcaagggcggcggtgacttggctaatctactcagactcattgcatggctcttgggtatcatggagtattccagcatagagcctgaccagcagtaaatgtctctcctggtacagttactgtctgctggactaagtgcgctgagatggttctcaatggagaatgcttaatttgcttttaacctcttgtttttgtgaggtgggtttagttttaagcttatgtcccataagaactccattcacaggcaagcagctctttccgcacacagcatatgcatcttctgaggtaatggctttataaggaagctgttcataacataagttattattattattgaacacaggtggatgtgaaggattttttttcattgaagaaccaaatggtttttcttttttctgttcagtgagcccacagagaccctggcaggaacagcattgctggcagcattgctgctgggcttttccagtgtagttcttgctcctaggtcacgtgacagcgaacacgatgcctgaggaccgcgcagacaggtttcccaccgcacagccgcccaaggtcccgccatggtccggtagctccttttcttgtcctcccctctgcccatctccacctgcagtactgagtggcgtttcccagtaccctttggggccacctcagggaacgggtttgcctggtattcagccagcggcacccaccctgccccacgaggctccctcagatccgccccacatccgtgtgttgaagaggagaaaggaccagggaaccaaaggagtggactgttgagttttatttatttattttttgtttttttttctcctaagtctgccagtctctgagatcagaacgacagtgtagggtagccgcctaatcatgttgtgattctattggtgggatgaaatgttccgcccccatggaaggagtacactcgtcgtttatgttctgtaatcgcacaatgtactgtaacccaaattccaattccatgtatttttattacagtttctctgggaaaaaaaaatgtgaaacaataaaaaggtgttgattcacgaaaaaaaaaaaaaaaaaaaaaaaaaaaaaaa

SEQ ID NO: 3658 - DNA, 1803 bp, Rattus norvegicus
  Genbank Accession No. NM_031620
agtcagcgtaaattgtgcgtgttaaagctcaccaggtacaggccttcagtttcctgtactaagtgcttctgcccaccagagcaaccgattctaaggcctggctctagcaatggccttcgcaaatctgcgcaaaatactcatcagtgatagcctcgacccctgctgccggaagatcctgcaagatggagggctgcaggtggtggagaagcagaacttgagcaaggaggagctgatagccgaactccaggactgtgaaggccttatcgtccggtcagctactaaggtcactgctgatgtcatcaatgcagcagagaagctccaggtggtgggcagggctggtacaggcgtggacaatgtggatctggaggctgccacaaggaagggcgtcctcgtcatgaacacccccaatggaaatagcctcagtgctgcggaactcacctgtgggatgctcatgtgcctggccaggcagatcccccaggcgacggcttcgatgaaagatggcaaatgggaccggaagaagttcatggggacagagctgaacgggaagacactgggaattcttggcctgggcagaattggaagagaggtggccgcccgaatgcaggcctttggaatgaagactgtaggctatgaccccatcatttctccagaagtcgctgcctcctttggtgttcagcagctgccgctagaggagatctggcctctctgtgatttcatcactgtccataccccgctcctgccctccactacaggcttgctcaatgacagcacctttgcccagtgcaagaaaggcgtgcgggtggtgaactgtgctcgaggaggcattgtggatgaaggtgccctgctccgtgccctgcagtctggtcagtgtgctggtgctgcactggatgtgtttacagaagagccaccacgggaccgggccttagtggaccacgagaacgtcatcagctgtccccacctgggcgccagcaccaaggaggcccagagccgctgtggggaggaaatcgcagtccagtttgtggacatggtgaaggggaaatctctaacaggggttgtaaacgcccaggctcttaccagtgccttctctccacacaccaagccttggattggtctggcagaagcattgggcacactgatgcacgcctgggctggctcccctaaagggaccatccaggtggtgacacaaggaacatctctgaagaatgctgggacctgcctgagccctgcggtcattgtcggccttctgagagaagcatcaaaacaggcagatgtgaacttggtgaacgctaagctactggtgaaagaggctggcctcaatgtcaccacctcccacagtcctggtgtcccaggagagcagggcatcggggaatgcctcctgactgtggccttggcaggtgctccctaccaagctgtgggcttggtccagggcaccacaccaatgttgcagatgctcaacggagctgtcttcaggccagaggtgcctctacgcaggggccagcccctgctcctgttccgggctcagccctccgaccctgtcatgctgcccactatgatcggcctactggcagaggcgggggtacagctgctgtcctaccagacctccaaggtgtctgacggagacacttggcacgtcatgggcctctcctccctactgcccagcctggacgcatggaagcagcatgtttctgaggctttccagttctgcttctgacccaggggctcagcggtcccagcccctcaggctcttctgaggaaacccgctcactgtgacctgaactaatatctagtaaagaatctaactcc

SEQ ID NO: 3659 - DNA, 3662 bp, Rattus norvegicus
  Genbank Accession No. NM_031622
agacctgccgggcgcatatttattcacagttttgtcccatgttaagtcggttagcatagtgaatctgagtgcatagtatgtcatttcattccgttgagtttctcgagtgttttctttaaatgtctgcagagtcgctacccttccttgaactatgaagcactgcaatcttcttaattctcagtatgaagagagatttttgagctttaagtctgaggggaactcagcaggcctggttggcgtctgcaatgaacatcaagaaaccatcgtgctgtgggaatgtgatcgtttttctccctttttgagagatctttccttttgatgccagttttcttccttgtttacacaagttcaacaatttgaaaggaaaaggcaattgtaagggttttaaaatggcagagaaatttgaaagtctcatgaacattcatggctttgatctgggttccaggtacatggacttaaaaccattgggctgtggaggcaatggcttggttttttctgctgtagacaatgactgtgacaaaagagtagccatcaagaaaattgtcctcaccgatccccagagtgtcaaacatgccctccgtgaaatcaaaattattagaagacttgaccacgataacattgtgaaagtgtttgaaattcttggtcccagtggaagccagctgacagacgatgtgggctctctaacagagctgaatagcgtctacattgttcaggagtacatggagacagacttggcgaacgtgctggagcagggccctttactggaggagcatgccaggctcttcatgtaccagctgctgcgtgggctcaagtacatccactctgcaaacgtgctgcacagggatctcaagccggccaaccttttcattaacactgaagacttggtgctgaagattggtgactttggcctggcccggatcatggatcctcattattcccataagggtcatctttctgaaggattggttaccaaatggtacagatctccacggcttttactttctcctaataactatactaaagccattgacatgtgggctgcaggctgcatctttgctgaaatgctgactggtaaaaccctctttgcaggtgcacatgaacttgaacagatgcagctgatcttggagtctatccctgttgtgcacgaggaagatcggcaggagcttctcagcgtgattccagtttacattagaaacgacatgactgagccacacaaaccgctgactcagctgcttccggggattagtcgggaagcactggatttcctggaacagattctgacgttcagtcccatggaccggctgacagccgaggaagcactttcccatccttacatgagcatctactctttcccaacggacgagcctatttccagccatcctttccacatagaagacgaagtggacgacattttgctaatggatgaaacacacagtcacatttataactgggaaaggtaccacgattgtcagttctcggagcatgactggcctattcataacaactttgatatcgatgaggttcagcttgacccgagagctctgtctgatgtcaccgatgaagaagaagttcaagttgatcctcgaaagtacttggatggagaccgagagaagtatctggaggatcccgccttcgacaccagctactctgctgagccttgctggcagtacccagatcaccacgagaacaagtactgtgatctggagtgtagccacacctgtaactacaaaacaaggtcgccatcatacttagataacctggtgtggagggagagcgaggttaaccattactatgagcccaagcttattatagatctttccaactggaaagagcaaagtaaggacaaatccgacaagagaggcaagtccaagtgtgagaggaacgggttggtcaagcgcagattgcgcttgaggaagcgtcccagcagctggctgagagggagaggggccaaggctttgactttgatgccttcatcgcaggcaccgttcagctcagtgcccagcgtgagtctgctgacgtagttgacaagttaaacgacttgaatagctcagtgtcccagctagaaatgaaaagcctgatatccaagtcagtcagccgagaaaagcaagaaaagggaagggctaacctggcccagctgggagccttgtaccagccctcctgggagagccagtttgtgagtggcggggaggagtgcttccttatcagtcagttttgttgtgaggtcaggaaggacgaacacgtggagaaggagaacacttacaccagctatttggacaagttttttagcaggaaggaggattctgaaatgctagaaactgagccagtggaagaagggaagcgtggggagagaggccgtgaggcagggcttctgagcagcggtggggagtttctcctgagcaggcagctagagtccataggcaccccgcagttccacagtccagggggatccccactcaagtccatccaggccacgttaacaccttccgctatgaaatcttcccctcaaatccctcacaagacatacagcaacattctgaaacatctgaactaaacactcagcagacacttcttttgttcttcatgaaatgtgttgtgtcttttttatcactaatgttttaagtcattttttttttacttgaatcagaaggtgtcattaatttgcaaggatttttcttggttctcagtttgtaaaacacagagttttttctacatgtgagttagttttcatttgaactggcatgtcgtttgcacacacacaaagaatagagcaaaacaatgcagtgcaggaggagacaagatgcgctaggatggacagacattctcacagaccagtgacctgcttacaggaaacaaaaccttgccttgaaacttacacagtgagactgtacataattgcatgaaaagatctatttttttcctgaaacatttttcattcattagtattttcaagtttttcatactgtacacatttcttaagacacatgataccagcagcaactgaaaacgaatgccgaatttggtacacatgtgttatctacctcaaggtaacaaaagtatgcgggcgaaacctaacccacccatagtcgtccgcggcatatgcacttgtatctagccagcgttggccgcagtaaccaatgagactcgtccgccatttatcaatgtcctggtgttcatcctttacagtgaagtgttagatacatcacatcttatttatttttagcaaatcagtatattttctgtatttaattataaaaggtaacttagtttaagtttatttgcaactgcccttcttcccgtttggcactatggtttgttgcctgccgagctgatctgagaagtcagcttgtcccgaggctgtccatgtacgttaagtaaagtgctcactgtgtataggaatctgtattttggaggtgcttgatctatctacaaagaaaaaaattaggaatttattataaaatgctcctagaagtcttaatggtgtttattttttaaaaccttgtaatgttagacttgtgtgcatggaagtgattaaggtacatcattattgtagtttgaacattgtacatgataagccttcccccacccccgtttttactgtatgtttttattgaatgatctattccccatccctaggcaagcatgaataaaattaggttaaatgt

SEQ ID NO: 3660 - DNA, 831 bp, Rattus norvegicus
  Genbank Accession No. NM_031629
ggcacgagtgactaagatggaagcgttttgggagtcacggactggccactgggcggaggtccggggcagttttaccggcgtcccgtcacccccagctgcctcatggatccgatgtctgcgcctgcgaggtccatcactcggacccagaatccgatgctgactgggacatccgtactaggggtgaagttcgactgcggagtggtgattgctgcagacatgctgggctcctacggctccctggctcgtttccgcattatctctcgtattatgcgagtcaacgacagcactatgctaggtgcttcaggagactatgctgatttccagtatttgaagcaagttctcggccagatggtgattgatgaggagctgttcggagatggacatagctatagtcctagagctatccattcatggttgacaagggccatgtacagtcgccgctccaagatgaaccctctgtggaacaccaaggtcattggaggctatgctggtggagaaagctttcttggttatgtggacatgcttggtgtagcttatgaagccccttcactagccactggttatggtgcatacttggctcagcctctgcttcgagaagttctagagaagcaaccggtgctgagtcagacagaggcccgagagcttgtggagcgctgcatgcgagtgctgtactaccgagacgctcgttcgtataaccggtttcaagttgctactgtaactgaaaaaggtgtggagatagaaggaccactgtcagcacagaccaactgggacattgctcacatgatcagtggctttgaatgaaatccagatgaagtgtccagagttaagctt

SEQ ID NO: 3661 - DNA, 1778 bp, Rattus norvegicus
  Genbank Accession No. NM_031640
gagttgcggttgctgctctgcagaacctcgtgaccaggtattccgatttggagtccttgaattaaaaacaaccatggagcatgtcattggagacagcaagaagaaaagaaactagggacaatgaggttccttttcttcctgttcgttgctgttgttcaccttttctccttgggctctggaaaagctatatacaagagtggtgtttctcagcgaacatttcaagaaataaaagaagaaatagccaactatgaagatgttgctaaagcaattatcaaccttgctgtttatggaaaataccagaaccggtcgtatgagcgtttgggacttctagttgatactgttggacccagactgagtggctctaagaacctagagaaagctatccaaatcatgtaccaaaacctgcaacaagatgggctggaaaacgtccacctggagcaggtcagaatacctcactgggggaggggcgaagaatctgcagtgatggtggtgcctcgaattcacaagttggctattttaggccttggcggcagcattgggactcctcctgaaggtatcacagcagaagtactcgtggtggcctcttttgttgaacttcaaagaagggcatcagaggcaagagggaagattgttgtttataaccagccttacactgactatgggaaaactgtgcagtaccgggagcgcggagctgtggaagctgccaaggtgggggccgtggcatccctcatccgatcagtagcttctttttccatctacagtcctcacacaggtcatcaaggatatcaagatggtgtgcccaagattccaacagcctgtatcacaatagaagatgcagaaatgatgtctcgaatggcttctcgtggggacaaaattgtcattcatctgaaaatgggagcaaagacctatccagatacagattccttcaacactgttgcagagatcactgggagcaagtatccagaggaagttgtcctggtcagtggacatctggacagctgggacgtcgggcagggtgcactggatgatggcggtggagccttcatatcatgggaagcactctcacttgttaaagatcttgggctgcgtccaaagaggactctgcgcttggtgctctggaccgcagaagaacaaggaggggttggtgcctcccagtattatgagctacataaggcaaatatttccaagtacagtttggtgatggaggctgactcaggaaccttcttacccactgggctgcagttcaccggcagtgacaaggccagggctatcatgaaggaagtcatgagtctcctgcaacccctcaatatcaccaaggtctttaatgatgcagaaggaactgacattaacttctggatccaagctggagtgcctggagccagtctgcgagatgacttgtacaagtatttctttttccatcattcccatggagacaccatgactgccatggatccaaagcagatgaatgttgctgctgctgtttgggctgttgtcgcttacgttgtggcagacatggaggaaatgctgcccaggtcctaaggaaaacaagaaggaagaaccttgttctctgcagctgggaatccccattcgggattttcacagcagccatcttcacagcaccttgttatacactcaatccccgtggcacagtttctttataccttctgttaaccatctttccttgatacgcttttacctgttctagaataagtaatcatcactactgtaccaccttgaaaatactgtttccagtttaaaaataaacaataaatatatga

SEQ ID NO: 3662 - DNA, 2136 bp, Rattus norvegicus
  Genbank Accession No. NM_031643
gaattccgcggaattccgcccggctgcaagatgcccaagaagaagccgacgcccatccagctgaacccggcccccgatggctccgcggttaacgggaccagctcggccgagaccaacctggaggccttgcagaagaagctggaggagctggagctggacgagcagcagcggaagcgccttgaggcctttctgacgcagaagcagaaggtgggagagttgaaggatgatgactttgagaagatcagtgaactgggggctggcaatggtggagtggtgttcaaggtctcccacaagccatctggcctggttatggctaggaagctaattcacctggagatcaaacccgcaatccggaaccagatcatccgggagctgcaggtgctgcatgagtgcaactccccgtacatagtgggcttctacggggccttctacagtgacggcgagatcagcatctgcatggagcacatggatggtgggtccttggatcaagtgctgaagaaagctggaagaattcctgagcaaattttaggaaaagtcagcatcgctgtgataaaaggcctgacatatctacgagagaagcacaagattatgcacagagatgtcaagccttccaacattctagtgaactcacgtggggagatcaaactctgcgattttggggtcagcgggcagctaattgactccatggccaactccttcgtgggaacaaggtcctacatgtcgcctgagagactccaggggactcactactctgtgcagtcggacatctggagcatggggctctctctggtggagatggcagttggaagataccccattcctcctcctgatgccaaggagctggagctgctgtttggatgccaggtggaaggagacgcggccgaaacgccacccaggccaaggacccctgggaggcccctcagctcatatggaatggatagccgacctcccatggcaatttttgagttgttggattacatcgtcaatgagcctcctccaaaactgcccagtggagtattcagtctggaatttcaggattttgtgaataagtgcttaataaagaaccctgcagagagagcagatctgaagcagctcatggtacatgctttcatcaagagatctgatgccgaggaggtagacttcgcaggctggctctgctccaccattgggcttaaccagcccagcacaccaacccacgctgccagcatctgagcctttgggaagcagcagagaggaatcctctgcccagtggcatgccatgttgctttcaggcctctcccatgcttgtctatgttcagatgtgcatctcatctgtgacaaaggatgaagaacacagcatgtgccaaatcgtacttgtgtcatttttaatattgtctttatcgctatggttactcccctaagtggattggctttgtgcttggggctatttgtctgttcatcaaatacatgccaggttgaactacagtgaaaccctggtgacctgggtggtcttcttactgatgtttgcgctgctgttcatcgtgactcactagctggctgcctgtattgtcaggattctcggacccttggtacttcactcttgctggtgacctctcagtctgaggagagggggccttctgagacccttcacaggcagtgcatgcatgaaaagcatgctttgctgctactgaaatgagcaccagaacgtgtacatcatggtattttatttttgcttttggtatagaactcagcagttcccatttaaaaaaaaaatctaaccagagcccatcactgccatgatagctggggcttcagtctgtctactgtggtgattttagacttctggttgtatttctatatttatttttaaatatactgtgtgggatacttagtggtatatgtctctgagtttggattagtgtttctaaattggtagttattttgaatgtcacaaatggattaaggaatcaacgtatcaagagttctatctttcttccagtctaagtaccaatgctattgtaaacgtgtatagtgcctacaaattgtatgaaaacccttttaaccactttactcaagatgtttatcaaatctaatctcttattctaataaaaatactatcaagttaaagtaaaaaaaaaaaaaaaaaaaacggaattc

SEQ ID NO: 3663 - DNA, 279 bp, Rattus norvegicus
  Genbank Accession No. NM_031648
atggcacctctccaccacatcttgattgtctgtgtgtgtctcctctccatggccagtgcagaagctccgcaggaaccagatccattcacctacgattaccacaccctgcggatcggcggcctcactgctgggatcctcctcttcatcttgggcatccttatcatccttagcaaaagatgccggtgcaaattcaaccaacagcagagaactggggaacccgacgaagaggagggaactttccgcagctccatccgccgtctgtccacccgcaggcggtaa

SEQ ID NO: 3664 - DNA, 3212 bp, Rattus norvegicus
  Genbank Accession No. NM_031650
ggttagacatgccacgcttgctctagaagcctgagctcagggtagacgaccatttcaaaagaaatatttatcaacagtgattgcagacgttcccatcacaaccactgttcagtcatggaccacactcagcagtcaaggaaagctgcagaggcccaaccttcacgatcaaagcaaacaaggttctgcgatggattcaagctatttttggcagccctctccttcagctacatatgcaaagcactaggtggagttgttatgaagagttccatcacccaaatcgaaagaagattcgacataccatcttccatttctggtttgattgatggaggctttgaaattgggaatttattagttattgtatttgtgagttactttggatccaaactacacaggccaaagctgattggaattggctgcttcatcatgggcattgggagcattttgacagcgttgccacatttcttcatgggatattacaagtatgcaaaagaaaacgacattggctctctaggcaactctacattgacctgtttcatcaatcaaatgacatcacccactggaccttcacctgagatagtggagaaaggttgtgaaaaggggttaaagtcacacatgtggatttatgtcttgatggggaacatgcttcgtgggataggggaaacaccaatagtgcccctgggaatttcctaccttgatgactttgcaaaagaagggcacacttccatgcacctaggtactctgcatactatagcaatgattggaccaatccttggctttatcatgtcatctgtgtttgctaagatatatgtagacgttggatatgtagacctgaacagtgtccgaataactcctaatgatgctcgttgggttggtgcctggtggctcagcttcattgtgaatggactattatgcattacttcttccatacccttcttttttctgcccaaaattccaaagaggtcacaggaggaaaggaaaaattcagtatctcttcatgcacccaaaacagatgaggagaagaaacacatgactaatttaacaaagcaagaggaacaagatccttccaacatgactggttttctaaggtctctgagaagcatccttaccaatgaaatatatgttatattcttgatactgacgttactacaagtcagcggcttcattggctcctttacttacctgttcaagttcatagagcagcagttcggccggacagcatctcaggccaacttcttgttaggaattataaccatacctactatggcaactgcaatgtttttaggaggatatattgttaaaaaattcaaattgacatcggttggaatcgccaagtttgtatttttcacctcctcagtggcctatgcgtttcagttcttatattttcctctactctgtgaaaacaagccatttgctggcctaaccttgacctacgatggaatgaacccagtggactctcacatagatgtaccactttcttattgtaactcggactgcagttgtgataaaaatcaatgggaacccatctgtggggaaaatggagtcacttacatttcaccttgtctggcaggatgcaaatcttttcgtggtgataagaagccgaataacacagagttctatgactgcagttgtatcagcaactctggaaacaactcagcacatttgggtgaatgcccaagatacaaatgcaaaaccaactattacttttatataattcttcaagtcactgtgtcctttttcactgcaatgggaagcccatctttaatcttgattctgatgaagagcgtccaacctgaattgaaatcacttgcaatgggtttccattcactgattattcgagcactaggagggattctagctccaatctattatggggcattcattgacagaacgtgtattaagtggtctgtcaccagctgtggaaaacgtggtgcatgtaggctatataactccagattatttggattctcctacttgggtttgaacttagctttaaaaactccaccactttttttatatgttgtattaatttatttcacaaagagaaaatataaaagaaatgataacaagacattggaaaatggaagacagttcacagatgaaggaaacccagattctgtaaataaaaatggatactattgtgtaccttatgatgaacaaagcaatgaaacacctctttaaggaaagagaaagatacatctgttgctgtgttttcaaatacccccggggttctttcactgaaatttttcatactttatatgtaatagagaatttataaccctatgcatttataattaaacaaattgcaaatcaaaagaaataagagaacccttgttagggtatagctgtgcatttgtagctaaagatttggagatatataaacaggtattcgcttaagcatttataactcaataaaatagagaatggggcaaggatggacaaaggggaaagggactgtgaaaaattgttgtctttaaaaatcaaaatttgaatcgtactattcatgccagaagcttctgtgataggtgacttcatgatgtggcatattctggtatccccggtaagtcaaatatatatatatatatatatatatatatatatatatatatatatatatatttttttttttttttggagctggggaccgaacccagagccttgcgcttgctaggcaagtgctctaccactgagttaaatccccaaccctaagtcatatatttttaattattaattttaaattgtgtttaatgacatatccatcttctttgtacatactgtacagaatattgagaataaaacagagacgtttaggatgtgagatatctctgtctatctctatctctacccctagcttcacctccttctctgtctccatctccctatctatctatctatctatctatctatctatctatctatcatctatctatccatctatgtatctgtctatctattatctatctatctatctatctatctatctatctatctatctatctatctatctacaatctccccaaatatctaaaattaagatagagtgaatgagacagatatctgtagacactgtattttcttgtgtgatcagatctagtgtggtggatgatagaagttgaacttgctttattgctatgtgttaaaatattttgtttgcattaaaatggcctattgaaatgcttttctgttcctataataaaataacctgatgaaaaagt

SEQ ID NO: 3665 - DNA, 859 bp, Rattus norvegicus
  Genbank Accession No. NM_031656
gcacgagctgcaggcggagactgcaccatggccccagacccctggttctccacgtacgattctacttgtcagattgcccaagaaatcgctgagaagattcaagaacgaaatcagtgtgaaagaagaggtgagaagacacctaagcttaccctgacaatcagaactttgttgaagaatctgaaggtaaagatcgacctcttgaaggacttacttctaagagctgtgtcgacgcgccagataacacaactggagggggatcgaagacagaaccttctggatgatcttgtcacccgagagagactgctcctggcatcgtttaagaatgagggttccgagccggatttgatcaggtccagcctgatgagtgaagaagcaaagcgaggaactcccaacccttggctctgtgaggagccggaggagaccagaggcttgggtttcgatgagatccggcaacagcagcagaaaattattcaagaacaggacgcaggtcttgatgccctttcctctatcataagtcgccaaaagcaaatgggccaggagattgggaatgaactggacgaacagaacgagatcatcgatgaccttgccaacctggtggagaacacagatgagaagcttcgcactgaagccaggcgagtgaccctggtggacagaaagtcagcttcctgtgggatgataatggtgatcttattgctgctcgtggctattgtggtggttgcagtgtggccaaccaactgatggcaataaggggaccacccgcagtgacacagccaacaatgagtgaaagcccagcacccttttggtacacaacacctcctctcaataaattctccacgctcccggcaaaaaaaaaaaaaaa

SEQ ID NO: 3666 - DNA, 3834 bp, Rattus norvegicus
  Genbank Accession No. NM_031668
atgaaatatgccctgaagcgcctaatcactgggcttggggtgggccgagaagctgctaggccctgctacagtctggcgctagcacagctgttgcagtcttttgaagacatccagttgtgtgacatcctgggacagatacaagaaaaatacaatctacaagcaatgaacaaggcaatgatgagacctactctctttgcaaacctgtttgcagtgcttgccctctttcagtcaggacgcctagtgaaggataaagaagccctgatgaagtgcgtgagattgctgaagatattgtcccatcactacaaccacttacaggggcagccagtaaaggctctggtggacatcctctccgaggtcccagagtccatgttccaggagatcctgccaaaggtcctcaagggggacatgaaagtgatcctcagctctcccaagtacttggagctcttcctcttggctcggcagagggtgccagcagagctcgagtcactggttggctcggttgatctgttctcagaagacaacattcccagtctggtgaatatactgaaggtggcggccaactctgtaaagaaggagcagaagctgcctgatgtggctctgaacctgctccgcctggcacttcaggagaacaaatttgaacggttctggaaggaggttttggaggaggggctgctgaagaagccatcctatacatccagctacatgtgtttccgcctactgggtgcatctctgccgcttctgtcagatgagcagttgcagttggtgatgcgaggagacttgatccgacattttggggagcacatggtcgtttctaagtcccaaaacccgctaaggttcattccagagataagtgcatatgtgggtaccttcctcgaggggtgccaggacgatcccaagcggcaattcactgtgatggtggccttcacggccatcaccaatcaaggtctccctgtcatgcctaccttctggcgtgtcacgcggttcttgaatactgaagccctgcagaactacgtgacctggctgcgggacatgttcctgcagcctgacctggactccttggttgacttcagcactgccaaccagaagagagttcaggacgcctccttgaatgtgcctgagcgaacagtattccggctccggaagtggatcatccaccgcctggtcagccttgtggatcatctgcacctggagaaggatgaagctgtggtcgagcaaatagccaggttttgcttgttccatgccttctttaagacaaagaaagctactccccagatcccagagacaaagcagcacttctccttccccttggaggacggcaaccgtggggtcattgtcagtgccttcttcagcctactgcagaccctcagtgtgaagttcagacagacaccagacctggctgaaaatgggaagccctggacttaccgcctggtgcagctggcagacatgctgttgaagcataaccgcaacgtagccaatgtgacacccttgacagcacagcagcgtcaggcctgggaccagatgatgagtacgctgaaggaactggaggcccagtcctcagagacccgggccattgccttccagcacctgctgcttctggtgggcctccacctcttcaagtcccctgcagaaagctgtgacgtcctaggagacattcagacttgcatcaagaaaagcatggagcagaatctgcgccgatcacgctctagagccaaagcctcccaggagccagtgtgggtggaggtgatggtggagatcttgctgtccttgctggctcaacccagtaacctgatgcgccaggtggtccggagtgtttttggtcatgtctgttcccacctgactccacgtgggctacagctaatcctggctgtgctcaaccctgagacaaatgaggatgaggaggacaacgtggtggtcactgacactgacgagaagcagctgaaacatggagaggacgcagactcagacagtgaggacagtaagaactcagagagtgacgtggatagtgaggatggggaagaaagtgaagaggaggaccgtgataaggatgtggacccaggcttccgacaacagctgatggaagtgttgcaagctgggaatgcactgggtggagaggaggaggaggaggaagagcttggggatgaggccatgatggccctggaccagaacctggccagcctatttgcagagcagaagatgcgtatccaggcccggcatgaggagaaaaacaagctgcagaaggagaagcagctccgacgagacttccagatcagggcactagacctgattgaggtgctggtgaccaagcagcctgagcaccccctgatcctggaacttcttgagccactgctaaacatcatccagcgcagcatgcgcagcagaggctccaccaagcaggagcaggacctcctgcacaagaccgcccgcatcttcatgcatcatctttgtcgtgcccgccactactgccacgaggtggagcctggcgcagaggctctgcatgcccaggtggagaggtttgtgcagcaggctggcaaccaggctgacgcctctgttgccctttactatttcaatgcctctctgtacctgctgcgagtcctcaagggcaacaccactaagaggtaccaagacggtcagaagttagagggagcagacatcaagtctgaacccaaggactcagaggtccagactaccagttgcttggacttggactttgtgacccgggtgtattcagcgtcattggaatctcttctgaccaagcgtaacagcccactcaccatccccatgttcctcgacctcttctcccgatatccagtgatctgtaagaacttgcttcccatcgtggtccagcatgtggctggctcatctcggccccgccatcaggcccaggcgtgcctgctgctccagaaggccctgtctgcacgggagctgagagtgtgttttgaggatcctgagtgggagcagctgattagccaggtcttgggaaagaccacccagaccctgcagactcttggggaagcacagagcaaaggggaacaccagagggagctatccatcttggagctgctgaacactgtcttcaggatagtcaatcacgagaagctgtctgtggacctcactgctttcttgggcatgcttcaaggcaagcagcagaagctgcagcaaaacctgcagcaagggaatcactcgtctggctccagtcgcctctacgatctctactggcaggccatgaacttgcttggagtgcagcgtccaaagtcagaaaagaagaatgtgaaggatattcctagtgacagccagagtcccattagcacaaagcggaagaaaaagggattcttgccagagaccaagaagcgaaagaaacttaaatctgagggtaccacatcagaaaagaaggctgcatcacagcaggatcgagtgacagagggtgccatgcctgctgccactggtaaagaccagccccccagcacaggcaagaaaagaaggaagagagtgaaggctaacaccccatcccaggtgaatggagtaactgtggccaagagtccggctcccaataaccccaccctgagtcccagcaccccccctgccaagaccccaaaagtgcagaagaaaaaagagaagctgtcacaggtgaatggatccactcctgtgtcccccgtagagcctgaaagcaaaaagcatcagaaggctctcagcacaaaggaggtcaaaagaaggtcctcccagtctgccctgccaaagaaaagagcaaggctgtctctggtgagcaggagccccagcctgttacagagtgggatcaggaaaaggagagtggccaggaggagagtccagacaccttga

SEQ ID NO: 3667 - DNA, 917 bp, Rattus norvegicus
  Genbank Accession No. NM_031682
ggctcgtgcaagatggctgcggcgtgtcggagcgtgaagggcctggtggcagtaataaccggaggagcctcgggccttggcctgtctacagccaaaagactggtgggacaaggagccacagctgtacttctggacgtccctaactcagagggtgagaccgaagccaagaagttaggaggaaactgcatatttgccccagcaaatgtgacctctgagaaggaggtacaagcagctttgactctagcaaaagaaaagtttggccgtatagatgtggctgtcaactgtgcaggcattgcagtggccattaagacataccacgaaaagaagaaccaggtccacaccttggaggacttccagcgggttatcaatgtgaatctcataggcactttcaatgtgatccgcctggttgctggtgtgatgggccagaatgaaccagaccagggaggtcaacgtggagttatcattaacactgccagtgtggctgcttttgagggccaggttggacaagctgcatactctgcatccaaagggggcatagtgggcatgacactgcccattgctcgagatctggctcctataggcatccgtgtggtaacaattgctccaggtctgtttgccaccccactgcttaccactctgccagacaaagtgcgcaacttcttggccagccaggtacccttccccagccgactaggtgaccccgcggaatatgctcatctggtacagatggtaatcgagaacccattcttgaatggagaggtcatccggctggatggggccattcgaatgcagccttaaaaggccaaggcaggaaaaacaccggctccttttcagtttgaaggaaacctaacagccactttgtaactttgctccattcaccctctgtgcctaataaattctcaaatctgaaaaaaaaa

SEQ ID NO: 3668 - DNA, 1766 bp, Rattus norvegicus
  Genbank Accession No. NM_031684
caccatgacaaccagtcaccagcctcaggacaggtataaggctgtctggctcatcttctttgtcctgggtctggggacactgctcccctggaatttttttataacagcaacccagtatttcacaagccgcctgaacacgtcccagaatatatccttggtcaccaaccaatcatgcgaaagcaccgaggccttggctgacccctcagtgtccttgccagcccggagttctctcagtgccatcttcaacaatgtcatgaccctgtgtgccatgttgcccttgctgatcttcacctgcctcaactctttcctgcatcagaaggtgtctcagtcccttcggatcttgggcagcctgctggctatcctgttggtgttcctcgtcactgccaccctggtgaaggtgcagatggatgccctgtccttcttcatcatcaccatgatcaagattgtgctcattaactcatttggtgccattttgcaagccagccttttcggtctggcaggcgtcctgccggccaactacacagcccccatcatgagtggccagggcctggctggcttcttcacctctgttgccatgatctgtgccgtcgccagtggctctaagctgtcagaaagtgcttttggttacttcatcacggcctgtgcagttgtcattctggccatactgtgttacctggccctgccttggatggaattctaccgacattacctgcagctcaaccttgcggggcctgcagagcaggagaccaagttggatctcatcagtgaaggagaggagccaagaggaggaagagaggaatctggggtgccaggccccaactctctacccgccaacagaaaccaatccatcaaagccatactgaagagtatctgggtcctggctctgtctgtctgtttcatcttcacagtcaccattgggttgttccctgctgtgactgctgaggtggaatccagcatcgcaggcacaagtccctggaaaaactgctacttcatccctgtggcctgcttcctgaatttcaatgtctttgactggctaggccggagcctcacagctatttgcatgtggcctggtcaggacagccgctggttgccggtcctggtcgcctgcagggttgtgtttatccccctgctgatgctctgcaatgtgaagcagcaccactacctgccctccctctttaagcatgatgtctggttcatcaccttcatggccgcctttgccttctccaatggctacctcgccagcctctgcatgtgcttcgggcccaagaaagtcaaaccggctgaggcagagactgccggaaacatcatgtccttctttctgtgtctgggcctggctctgggagctgtgttgtccttcttgttaagggcacttgtgtgagcgaccctgtgtggacagaggaactacactgcctgcttcctgctcacttccttcgctgttagggacgagcaggggtccagagggctgctcttctgctttcctccggtgctgggcccagatgtccaggaacaaaggagggagcctctgaggatggacttgggattgggggtcagagtggtagggggacaatggtctctgacggacagctctgactgatccctgcctaagccaagcacaagagactccacaaggatggggtggagacagatggctgactgtgtatcatgatctgatgtcccttgcccttctttcttctgtgcctgttccaggtccccgatccttgtcattttactgccttttttatactgacagaaaccaggtgccttca

SEQ ID NO: 3669 - DNA, 467 bp, Rattus norvegicus
  Genbank Accession No. NM_031687
  misc_feature (1)..(467): n = a or c or g or t
cggcagccaacatgcagatcttcgtgaagaccctgacgggcaagaccatcactcttgaggtcgagcccagtgacaccatcgagaatgtcaaggccaagatccaagacaaggaaggcatcccccctgaccagcagagactgatctttgctggcaaacagctggaggatggccgcaccctgtccgactacaacatccagaaagagtccaccttgcacctggtgctgcgtcttcgcggtggcatcatcgagccgtcccttcgtcagcttgcccagaagtacaactgtgacaagatgatctgccgcaagtgctacgcacgcctgcacccccgtgcagtcaactgccgcaagaagaagtgcggccacaccaacaacctgcgccccaagaagaaggtcaaatagagctgggcctatacctggcctgtgaccccgggaccaaataaagtccccttccatcgactggagcagtan

SEQ ID NO: 3670 - DNA, 2234 bp, Rattus norvegicus
  Genbank Accession No. NM_031698
ctcggaggaatggcgccgccgggttcaagtgctgtcttcctgttggccctgacaatcacagccagcacccaggctctgacccccacccactacctcaccaagcatgatgtggaaagactgaaagcctcactggatcgccctttcacgagcttggagtctgccttctactccattgtgggactcaacagccttggggcacaggtgccagatgtcaagaaagcgtgtgccttcatcaagtcaaaccttgatcccagcaacgtggattctctcttctatgctgcccaatccagccaagtcctctcaggttgtgagatatctgtttcgaatgagaccagagatctgcttctggcagcagtcagcgaggactcctccgttgcccaaatctaccatgcagttgccgccctcagtggctttggtcttcccttggcatcccatgaagcccttggtgcccttaccgctcgcctcagcaaggaggagactgtgctggcaaccgtccaggctctgcacacagcatcccacctatcccagcaggctgacctgaggaacattgtagaagagatcgaggaccttgttgctcgcctggacgaactagggggtgtgtatctccagtttgaggaaggcctggaacttacagcattgtttgttgctgccacctacaagctcatggaccatgtggggactgaaccgtccatcaaggaggatcaggtcatccagctcatgaacacaatcttcagcaagaagaactttgagtccctctcagaagccttcagtgtggcctctgctgctgctgcattgtcccagaatcgctatcacgtaccagtggtggttgttcctgagggctctgcttctgacactcaagaacaggctatcctgcggttgcaagtcagcagtgttttgtctcacgctctggctcaagccgcagttaagctggaacatgctaagtccgtggcttccagagctactgtcctgcagaagatgcccttttcacttgtaggggatgtttttgagctaaacttcaagaatgttaaacttcccagtggctactatgacttctctgtcagagttgaaggtgacaaccgttacattgcaaacactgtagagcttagagtcaagatctccactgaagttggcatcaccaatgctgatctttccactgtggacaaggatcagagcatcccacccaaaactacccgggtgacctacccagccaaagccaagggcacattcatcgcagacagccatcagaacttcgccctgtttttccagctggtagatgtgaacaccggtgcggagctcacccctcaccagacatttgttcgacttcataaccagaagactggccaggaagtggtgtttgttgctgagccggataacaagaatgtgcataagtttgaactggacacctctgaaaggaagattgagttcgactctgcctctggcacttacacactctacctaatcatcggggacgccactttgaagaaccccatcctctggaacgtggctgatgtggttatcaagttccctgaagaagaagctccctccactgtgctgtcccagaacctttttaccccaaaacaggaaattcagcacctgttccgagagcctgagaagaggccccccactgtggtgtccaatacattcacggccctcatcctctcgcccttgctcctgctctttgcactgtggatccggattggagccaatgtctccaacttcacctttgctcctaccacgattatctttcacctgggacatgctgcaatgctggggctcatgtatgtctactggactcagctcaacatgttccagaccctgaagtacctggccgtcctgggcactgtgacatttctggctggcaaccgaatgctggcccagcaggcagttaagagaacagcacattagttccagaagaagtttgaagaccctgaactcggaaatgaccgtttaacaaagagtggagacagttcagagtgtggaaagaatcgggggacagaataggagaagaggaaatacctgttatttaaagagagaaaagtcgagctatgcttacacgtttacttgtttctcactttttgcttcactgaacagatatgtttggacccagattgtctgtccctttgttgtgatgcctggccagattctgtgaatatcccaggttacccagaggttgtatttgaaaagttgaaatctgtaattcatcagctttggaataaagagaatggtggactccc

SEQ ID NO: 3671 - DNA, 893 bp, Rattus norvegicus
  Genbank Accession No. NM_031699
cagagagcaggggtatcagcgctaacctcctggctgagactccatcaccttcggggagcccaagcgcgcactttgcaaactccgctttctgcacctgccactgagcctcagaaaagagccatggccaacgcggggttgcagcttctgggtttcatcctggcttcgctgggatggatcggctctatcgacagcactgccctgccccaatggaagatttactcctatgctggggacaacatcgtgactgctcaggccatctacgagggactgtggatgtcctgcgtttcgcaaagcaccgggcagatacagtgcaaagtcttcgactccttgctgaatctgaatagtactttgcaggcaaccagagccttgatggtaattggcatcctgctggggctgatcgcaatctttgtgtccaccattggcatgaagtgcatgaggtgcttagaagatgatgaagtgcaaaagatgtggatggctgtcatcgggggcataatatttgtaatttcaggtctggcgatattagtggccacagcatggtatggaaatagaattgttcaagaattctatgaccccatgacccctgtcaatgccaggtatgaatttggccaggctctctttactggctgggctgctgcctccctctgcctcctgggaggtgccctactttcctgctcctgtccccggaaaacaacctcttacccaacaccacggccttatcccaagccaacaccttctagtgggaaagactacgtgtgacagcggcgaaggaagagatcctcctggagcgaatacgaaatggacattgagactagcattgacattaaggcctcaaactgttgacaatggtaatctaaactgtggtagaacaaaagcaagcatatttttatacgtcc

SEQ ID NO: 3672 - DNA, 1192 bp, Rattus norvegicus
  Genbank Accession No. NM_031700
ggaaaggagccgttagcgtgctccgtccattgccatccaccggtcgttcccggcgacagacctccgtcaacttttgaaggggagttggttctcaggtccagcggccgcgatccctggtctcccagcctacggagttacccggcggagttcaagtccagcagccatgtccatgagcctggagatcaccggcacgtcgctggccgtgctgggctggctgtgcaccatcgtgtgctgcgcccttcccatgtggcgcgtttcggcattcatcggcagcagcatcatcacggcgcagatcacctgggaaggcctgtggatgaactgcgtgcagagcaccggccagatgcagtgcaagatgtacgactcgctgctggccctgccgcaggacctccaggccgcccgagctctcatcgtggtgtctatcctactggcagccttcgggctcctcgtggcgctcgtgggggcccagtgtaccaactgcgtacaagatgagacggccaaggccaagatcaccatcgtggcgggagtgcttttcctgttggcggctgtgctcaccttagtgccggtgtcctggtccgccaacaccatcatccgggatttttataacccgctggtacctgaggcccagaagcgagagatgggaactgggttgtacgtgggctgggctgccgccgcgctgcaattgctagggggcgccttgctgtgttgctcctgcccaccacgcgagaagtacgcacccaccaagatcctctattccgcgccgcgatccaccggccctggcaccggtaccggcaccgcctatgaccgtaagactacgtctgagaggccgggtgcgcgcacaccgcaccatcaccactaccaaccgtcgatgtaccccacccgtccagcgtgcagcctcgcctcagagaccaccccaccttccagacggttacagacgccacgcagtctgcttgctaggctggaagaggacagacagcctggcgtccccttttctccggttgccacctgattacctggcctaggaactgtccaagtcgaatggacaaagacacctcgcccttcccaagtacagggttggggtggccatcgcagctacttgccagccccgcagccagaaggctcatagtgggcagagacaggcaaactataaaaagggccgtttcgtatttttcaataaaagcctttcgtttttgca

SEQ ID NO: 3673 - DNA, 696 bp, Rattus norvegicus
  Genbank Accession No. NM_031706
ctctttccagccagcgccgagcgatgggcatctctcgggacaactggcacaagcgccgcaagaccgggggtaagagaaaaccctaccacaagaagcggaagtatgagctgggacggccggccgccaacactaagattggccctcgccgcatacatacagtccgagttcgaggaggcaataagaagtatcgtgctctgagattggatgtggggaacttttcctggggctcagagtgttgtactcgcaaaacaaggatcattgatgttgtctacaatgcatccaataacgagcttgtccgcaccaagaccctggtgaagaactgcattgtgcttattgacagcacaccgtaccgacagtggtacgagtcccactatgcactgcccctgggccgcaagaagggggccaagctgactcctgaggaggaagagattttaaacaaaaaacgatcaaagaaaattcagaagaaatatgatgaaaggaaaaagaatgccaaaatcagcagtcttctggaggagcagttccagcagggcaagcttctcgcctgtattgcctcaagaccaggccagtgtggcagagcagatggctatgtgctcgaaggcaaggagctggagttctatctgcggaagatcaaagcccggaaaggcaaataaactgtcatagctcgtgtaataaaggtgtttgctgttctgtatatgt

SEQ ID NO: 3674 - DNA, 499 bp, Rattus norvegicus
  Genbank Accession No. NM_031709
tgttttcccctgccgccgccaagttccgcggagaagctccggggtgcgttcaagattcggcgtcacccgtaatccaccgccatggccgaggaaggcatagctgctggaggtgtaatggacgtcaacactgctctacaagaggtgctgaagaccgccctcatccacgatggcctagcacgtggcatacgcgaagctgccaaagccttagacaagcgccaagcccatctctgcgtgcttgcatccaactgtgatgagcccatgtatgtcaagctggtggaggcgctcttggccgagcaccagatcaacctgataaaggttgatgacaacaagaaactaggggaatgggtaggcctctgtaaaatcgatcgagaggggaagccacggaaagtggttggttgcagttgcgttgtagttaaggactatggcaaagaatctcaggccaaggatgtcatcgaggagtacttcaaatgctagaaatgaataaataaaattttggctc

SEQ ID NO: 3675 - DNA, 917 bp, Rattus norvegicus
  Genbank Accession No. NM_031714
cacgaggttgttactgccgtttcttctctggaggatcttcaagagggaaggattagcatgtcgtcaataatcagaaaagtgatcagcacttcaaaagccccggcggccattggtgcctacagccaagctgtgctagtggacaggaccatttacgtttctggacagataggcatggatccttccagtggacaacttgtgccaggaggggtagcagaagaagctaatcaagctcttaaaaacctgggtgagattctgaaggctgcaggctgtgacttcactaatgtggtgaagacaactgttttactggctgacataaatgactttggcactgtcaatgagatctacaaaacatatttccagggtaaccttcctgccagggctgcttaccaagtcgccgctttacccaaaggaagtcgaattgaaatcgaagccatcgctgtccaggggcctttcaccacagcaggactgtaaggagccatgctgatgctgactctggagtctttacaatgtctctcacactttaaatttaacaaatgattgctgggaagtgcacacatgaccgtgtgaagtgatcgtgggaatgatcatacatgtggagatttgacattaattggggattattcagtacagtggctagtgctgtaatttcacttatgtggctgggtgtgagagaaaggcacatagctgctaacatgcagagcagaatcatagacgaaacagtaaagagcacacctaattaaatcatatcaatttgcttgtgtggaatacttagttctcatgttagatatcagaaactaaattaaaatattcaaactttaatagtaccaggagaaaaaagtggacccaaatcttataagataatactgccttaatggaataaaaaacagatgtgtaaaaaaaaaaaaaaaaaactcgag

SEQ ID NO: 3676 - DNA, 1399 bp, Rattus norvegicus
  Genbank Accession No. NM_031719
ctgctttcttggttcctgtggagcaatgctttcgcccgcaatgagcttcctcaaaagcttcccgccccctgggtccgcagatggactccggctgcagcagccagacaccgaagctgtgctgaacgggaaggggctcggcaccggcacgctttacattgcggagagccgcctgtcttggctagatggttctggattaggattctcactggagtaccccaccattagtttacatgcggtatccagggacccaaatgcttatcctcaagaacatctgtatgtcatggtgaatgccagatttggagaagaatcaaaagaacctttctctgatgaagatgaggacgacaatgatgatgttgaacccatttctgagtttagatttgtgcccagtgataagtcagcattggaggcgatgttcacagcaatgtgtgagtgccaggccctgcatccagaccctgaggatgaagactcggatgactatgatggagaagagtatgatgtggaagcacatgagcaaggacagggggacatccctacattttacacctatgaagaaggactatcccatttaacagcagaagggcaagccacgctggagagattagaaggaatgctttctcagtctgtgagcagccagtataatatggcaggcgtccgaacagaagattcagtaagaacttacgaagatggcatggaggtagagaccacaccaactgttgccggacagttcgaggatgcagacgttgaccactgaggatgactcgtgtgacttacaattctgctcataactataggcaagaacttgatgcctcttcactccagaatggagctggtgaaaggctttttttcttctccaaaactcatttctcaagacaaactataatgagacagcaagctgtcaccagcagaaaagactttgacctctattaacaaaggtgaattaactgaacgggtttttgtagtttctcatttacccctaagcttcctgtgtctagttatcttctgagagcctctaattcctgctttgctgtgtgcaatctgtcagctacgaggctgtgtgtcgtgtgcacagtctcacgctggcaaaagtgaggtgggagcttagatgtctctgggacttaggaggactctctgatccctgagataaaaagcaaaggcctctgagggcacagctttagcattctccacggacgcatgggccctctactggggctcaaccacatctcgtcatgacaaatgcttgtgtgctacttctgttcctccgcatttaccatcagctctgttacattctcctagcttaggtccttgactgtcacagagtaaatcatctgaaatgaagtctgcaaagtactctcaatgatattttgtctttgtaatagttaaataaatctgggttttctat

SEQ ID NO: 3677 - DNA, 716 bp, Rattus norvegicus
  Genbank Accession No. NM_031722
agcggcttcgcctcgtccgcaccatggtgactctcgcagaactgctggtgctgctggccgcgctgctggccacggcctcgggctacttcgtcagcatcgacgcgcacgccgaggagtgcttcttcgagcgggtcacctcgggcaccaagatgggcctcatcttcgaggtggcggagggcggcttcctggacatcgacgtggagatcacaggaccagataataaaggaatctataaaggagaccgggagtccagcgggaagtacacgtttgcagcccacatggatgggacatacaagttctgctttagtaataggatgtccactatgactccaaagatagtgatgttcaccattgacattggggaggctcctaaaggacaagacatggagacagaagctcatcaaaacaagctagaagaaatgattaatgagctggcagtggccatgacagccgtaaagcacgaacaggagtacatggaagtccgggagagaatacacagagccatcaacgacaacacaaacagcagagtggtcctttggtccttcttcgaagctcttgttcttgttgccatgacattgggacagatctactacctgaagagattttttgaagtccggagggttgtttaaaaggccttttcctattgatcccaaattcatgatttacttgtttaccaaacaccttggtcataataatgtcattagtttatacatttt

SEQ ID NO: 3678 - DNA, 2977 bp, Rattus norvegicus
  Genbank Accession No. NM_031731
gaattcggcggatggaagccagctgtcccgagaagcagtgaactgtggcgtcatcccgagcagtgccttaccggtattgtgctgcttcacctgcctcgctcggcgttctcctcaggccccgccatggagcgacaggtccaacgacttcgccagacgttccggtccggccgatcgcggccgctgcgtttccgactgcagcagctcgaggccctccggaggatggtgcaagagcgagagaaggacatcttggcagccatcgcagcagacctgagcaaaagtgaactcaatgcatacagtcatgaagtcattaccatccttggggagattgacttcatgctggggaatcttcctgaattggcctctgctcggccagcgaagaagaacctgcttaccatgatggacgaggcctatgttcagccagagcctctgggagtcgtgctgattattggagcttggaactatccttttgttctgaccctgcagccactggtgggagccattgctgcaggaaatgctgccattgttaagccctcggaactcagtgaaaacacggctaagatcttggctgaactcctccctcagtatttagaccaggacctgtacatgattgttaatggcggcgttgaagaaaccacagagcttctgaggcagcggtttgatcacattctctacacaggaaacaccgcagttggaaaaattgtcatggaggctgctgccaagcacctgacccctgtgaccctggagctcgggggcaaaagcccatgctacattgacagagactgtgacctggacgttgcttgcagacggataacctggggaaagtacatgaattgtggtcagacctgtattgctcctgactatatcctgtgtgaagcctcctcccaggatcaaatcgtacagaagattaaggatacggtgaaggacttttatggggaaaatgtaaaagcttctcctgattatgaaaggatcatcaaccttcgtcactttaagaggataaaaagtttgcttgaaggacagaaaatagcttttggtggggagactgatgaagctacacgctacatagccccaaccatactcactgatgttgaccctaactccaaggtgatgcaagaagaaatttttggaccaattctcccaatagtgtctgtgaaaaatgtggaggaagccataaatttcataaatgatcgcgaaaagcccctggcactctacatattttctcacaacaataagctcatcaaacgggtgattgatgagacatccagtggtggagtcacaggcaatgatgtcatcatgcacttcactgttaattctttgccctttggaggtgtgggtgccagtggaatgggggcttatcatggcaaatacagtttcgataccttttctcatcagcgcccctgcttgttaaaagggttaaagggagagagtgttaacaaactcaggtaccctcccaacagcgagtccaaggtcagctggtcgaaattcttcctgctgaaacagttcaacaaaggaaggctgcagctgctgcttctcgtgtgcttggttgcggttgcagctgtgatcgtcaaggatcagctgtgatgacttccttgtagcctctactgaagtacccctcggccaaatggttaacacaccaatgcttttaaaattgtacccaaaccaggaaatgaaattcacaggtgaactgcagtcaaacctaagttgttgccacaaaccactgatgaaactcagtgcttcagccaaatcccagcatttgtcagccgtgcaggtgctgagagggtggagactgggaggggcgacacctagtccatggcagcgggatgtcagggagactcgacaactgctcccgcactctttgctccaggacatagctctcccacccggtgtcaacaccctccaggctttccagctgtcctctgattgctgaggttcctgttagggacccaggtactaaacctgggcgggtggatttgtcggcctcatccattgtggctcgagaccggccttcgggagtcggctctcagtctaaacatcctttctcattcatagtgtgtcacccgaagatgcttgtttgtgacattgtgacagtctgtcatgactgtcccggtgcctttgtgatgacttaaactacactgaggagcttgccaacttgtgaatgcccttcagagggtctggcagtcacagctgttccagagcccgagggacgaagattccggagcccggagtttgaggccaacctaggcaacataatgggaccctctcattattattcctccataacaatcccctcgagaccctcgatttgaatgttatataggtcttcaggataaatctgcttattttcacagcacaacacaaaaaaaatttacttttgaaatcttagagagattcctacagatcttagcatggagctgttcctgtagtgaaaggggggttattagacatgaggcttcagaactcatggggcagggttgttggagactaccgtgagctgagggggcacactgaagcgatgggatggccagaagcgcacctgagcaagcggggcagcattctctgtcagaccctaacatggctacacggggatgtggcagagagatctgtgccgttggctgccagcgctggttaggcctgaagctccaagctgcagaggtctcattgccttcccaggatccaaattaagactgcccactcaatgagaatgtcacttgcgtatgtacaaccatgtttgctgagtaacctgttccaccgttgaggctgtctgaagtgtattgtatgaggtatcaagaacgagtcattggcccatttggcaaatagttgcttatgtagcaattgtcatggactaatcataaaatattttgcacaaaatttcaatgttgaacttgcactcactgttgttaaattataaatcacagcttctagttaggccaaaatatttacatactctactaatcttcaaaataaatgtatcccggaattc

SEQ ID NO: 3679 - DNA, 1363 bp, Rattus norvegicus
  Genbank Accession No. NM_031732
aacctgtcaagtccccattctaagatgtccttggaaaaaatgaaagaccttcaccttggtgaacaggacctacagccagaaaccagagaagtgaatgggattctcatgtccaagttgatgagtgataactgggacaaaatctggaacttccaagcaaagcctgatgatctccttattgcaacctatgcaaaagcaggtaccacctggacgcaggaaattgtggacatgatccaaaatgatggggatgttcaaaaatgccaacgggccaacacctatgaccgacatcctttcattgagtggactttgccttcacccctcaactcaggtctggatctggctaacaaaatgccatcacctagaaccctgaagactcatctgcctgttcatatgctgccaccttccttctggaaagaaaactcaaaaattatctatgtggccagaaatgccaaggactgcctggtatcttactattacttctcaagaatgaataaaatgctgcctgaccctggtaccctgggagaatacattgaacagttcaaagctggaaaagtgctgtggggctcctggtatgaccatgtaaagggatggtgggatgtgaaagaccaacaccgtattctgtatctcttctatgaagacatgaaagaggaccctaaaagagaaattaagaagatagcaaaattcctggaaaaagacatatcagaggaagttcttaataaaatcatctaccacacctcctttgatgtaatgaaggaaaacccaatggccaactataccactctaccctccagtatcatggaccactctatatctcctttcatgaggaaagggatgcctggagactggaagaactactttactgtggcacaaagtgaggattttgatgaagactaccggaggaagatggcagggagcaatattaccttccgcacagagatctgagagcagtgaggaagagagaagccctagatttcctgactatatgctttagctatttgagcttcattcctgagttttgtatgtcctgtgatactatttcatcaaaatgtaatcagaccttccacactaggtgattatccttattgatacctactatacaaccatgcacttttactgcacttacgcaaataacagataccttcactagcctgtaattgtcttgtttcacggcaaatctcatgaatagagagacacacaaaacaggttagacataagaaagtaaataagaaaagccaaacgaatgagaagtgagcactgtgcattaaccaaaggctatttaattttcttaacaattgtcttcatctgttctctttaacgaaatacctaatttgtttataaagaataaaaatgatttcttatgcaaaac

SEQ ID NO: 3680 - DNA, 2963 bp, Rattus norvegicus
  Genbank Accession No. NM_031736
gacacagtactgccgatgttggacagaggatcgcttaacagaacgaaatctcaaaacaaattaacaggacccggttgcttgatttcccaaatcagaaaaggctcgaaatgtctagaggggctgactgatgcagcggtgacccggactggagacagttggacgcgatcatctctggtgcttttgttcaaccttgaaaccttcgccacaggagacttgcctgagcagagaagcaaacgtggagaaacaaagagagatctagcgaaaagcctctgggaccaaggaggggaggtgggactctgggttggcggtggcacctgctgccggctattaataatagggtcgcgatgcgtttataaggtgtttgattaaacaaagactctatgagagaagaataactagcaacagccccacgtctgagtcgtcgcctccgacctttttcaacgtgggttctttgggccgagcgtcgtttgccgagaactagatctcacctgaccccagacgctgaaaacaagcgctgtggcatcctgggccacccaagctgacaagggcgcgccccctgagcacacgaggtgccccacgagggggagggacccacagccgtcccgcccgcaccgcggtgtccgctgcgggcacctgcagccgagccgccacccgcagtcgcagcgcgtccggcggccgaacccggtcgtcagctcgtcagcacctgctctgcttctctcccgcccgccgccgcgctgcacgcctcgagcgctccctcggccccggcggggaccggggaccccgcagccaccgccatgctgcctgtgctctacaccggcctggcggggctgctgctgctgcctctgctgctcacctgctgctgcccctacctcctccaggacgtgcggttcttcctgcaactggccaacatggcccggcaggtgcgcagctaccggcagcggcgacccgtgcgcaccatcctgcatgtcttcttggagcaagcgcgcaagaccccgcacaagcccttcctgctgtttcgcgacgagacgcttacctacgcccaggtagaccggcgcagcaaccaagtagcgcgagcgctgcatgatcacctgggcctgcggcagggggattgcgtggccctcttcatgggcaatgagccggcctacgtgtggctctggctgggactgctcaaactgggctgtcccatggcgtgcctcaactacaacatccgtgccaagtctctgctacactgctttcagtgctgcggggcgaaggtgctgctggcctccccagagctacacgaagctgtcgaggaggttcttccaaccctgaaaaaggagggcgtgtccgtcttctacgtaagcagaacttctaacactaatggcgtggacacagtactggacaaagtagacggggtgtcggcggaccccatcccggagtcgtggaggtctgaagtcacgttcaccacacccgcagtctacatatatacttcgggcaccacaggtcttccaaaggctgcaaccattaatcaccatcgcctctggtatgggaccagccttgccctgaggtccggaattaaggctcatgacgtcatctacaccaccatgcccctgtaccacagcgcggcgctcatgattggcctccacggatgcattgtggttggggctacatttgctttgcggagcaaattttcagccagccagttttgggacgactgcaggaaatacaacgccactgtcattcagtacatcggtgaactgcttcggtacctctgcaacacgccccagaaaccaaatgaccgggaccacaaagtgaaaatagcactaggaaatggcttacgaggagatgtgtggagagagttcatcaagagatttggggacattcacatttatgagttctacgcttccactgaaggcaacattggatttatgaactatccaagaaaaatcggagctgttggaagagaaaattacctacaaaaaaaagttgtaaggcacgagctgatcaagtatgacgtggagaaggatgagcctgtccgtgatgcaaatggatattgcatcaaagtccccaaaggagaggttggactcttgatttgcaaaatcacagagctcacaccattttttggctatgctggaggaaagacccagacagagaagaaaaagctcagagatgtttttaagaaaggagacgtctacttcaacagtggcgatctcctgatgatcgaccgtgaaaatttcatctattttcacgacagagttggagacaccttccggtggaaaggagagaatgtagctaccacggaagtcgctgacattgtgggactggtagattttgttgaagaagtgaatgtttacggtgtgcccgtgccaggtcatgaaggtcgcatcgggatggcctcgatcaagatgaaagaaaactacgagttcaatggaaagaaactctttcagcacatctcggagtacctgcccagttactcgaggcctcggttcctgagaatacaagataccattgagatcaccgggacttttaaacaccgcaaagtgaccctgatggaagagggctttaacccctcagtcatcaaagataccttgtatttcatggatgacacagaaaaaacatacgtgcccatgactgaggacatttataatgccataattgataagactctgaagctctgaatgttgcctggctcctaacacttccagaaagaaacacaataggcctagcatagccccttcacatgtgtaatccaactttaacttgattaaaggttataggtgtgatttttcctaggaaattattcatttaaaggacaattgtttgtttgtttgtttgttttttattaattacaccagaacgtttgcaagtaaaaagatttaaagtcacttatttttcaatgtgcacctgccatttgtccttgcaaacttagcttcttggagagagggccttatttttttaaagacataataaactatgtaaacact

SEQ ID NO: 3681 - DNA, 1678 bp, Rattus norvegicus
  Genbank Accession No. NM_031738
ttacccaacctgcaccctctcactggctacagcactccctccgaccttgggattcccagacaccggccagcgttgctgcccttcggcttcctagccctgcgtaggcgcaggtgcaacctccctgcagtgggcctggtgcaataggactgcggacatcatggcgcacggaaacgcccctcgggacagctaccacctggtcgggatcagcttcttcattttgggtctgggcaccctcctcccctggaacttcttcattaccgccatcccgtacttccaggggcggttggcagggaccaacagcagcgctgagaccccgagcaccaaccacaccagtcccacagacaccttcaacttcaacaactgggtgacactgctgtcccagctgcctctactgctcttcacgctcctcaactccttcttgtatcagtgcatccctgagtcggtgcgtattctgggcagcctgctggccatactactgctctttgccctgacagcagcgctggtgaaggtggatttgagccccgggctgttcttttccatcaccatggcatccgtctggttcatcaattccttctgtgcagtgcttcaaggcagcctctttgggcagctgggtaccatgccttctacctacagcaccctcttcctcagtggccagggcctggctgggatcttcgctgcccttgctatgctcacgtccttagccagtggcgtggacccccagacctctgcccttgggtacttcatcacaccctgtgtgggcatcctcctctccatcatatgttacctcagtctgccccatctgaagtttgcccgttactacctgaccaagaagcctcaggccccagttcaggagctggagaccaaagctgagctcctcggagctgatgagaagaatgggattcctgtcagcccccagcaggcaggcccaactctggatcttgacccagagaaggagctggagctggggctggaggaaccacagaagccaggaaaaccttcggtctttgtcgtcttccggaagatctggctgacggcgctgtgccttgtgttggtcttcacagtcaccctgtcggtctttcctgctatcacagccatggtgaccaccagctccaatagccccgggaagtggagtcagttcttcaaccctatctgttgcttcctgctcttcaacgtcatggattggctgggccggagcctgacttcctacttcctgtggccagatgaggacagccagctgctgcccctgctggtgtgcctgcgcttcctgttcgtgcccctcttcatgctgtgtcatgtgccccagcgtgcccggctgcccatcatcttctggcaggatgcctacttcatcacattcatgctgctcttcgccatttccaacggctacttcgtgtctctcaccatgtgtctggcacccaggcaggtgctgccgcatgagagggaggtggccggagccctcatgaccttcttcctggccctgggactctcctgcggagcctctctctccttcctctttaaggctttactctgaggaccaccgcactccacagtcctccctcactgctgcttctggagctggacattcccggggaaggacctctgctataccgggtctcttggtctgtgggtgccaggagggggcagaaactaccttggctggtagccacattgcatatggtga

SEQ ID NO: 3682 - DNA, 2866 bp, Rattus norvegicus
  Genbank Accession No. NM_031753
gtggaggaaagttgcgtgtggcacagacccgacggcgcagcgccacagcgaccgggggatcgtgtgtcttggaaaaaaaagtcgctgtccccctaagcgagacccacaagcgagcgggccccgtgggcccggggacgacgccccctctgcggcgtggactttgtcggtggccttctaggaggaggaatatggcatctaaagggtccccttcttgccgtctggttttctgcctcttgatctccgccgcggtcctcagaccaggcctcggatggtacactgtcaactcagcatacggagataccattgtcatgccttgcagactggatgtacctcagaacctcatgtttggcaaatggaaatatgaaaagcctgatgggtccccagtatttattgcattcagatcttctacaaagaaaagtgtgcagtatgatgatgtaccagagtacaaggacagactgagcctctcagaaaactacactctgtctatcaacaatgcaaagatcagtgacgaaaagagatttgtgtgcatgctagtgaccgaggacaacgtgtttgaggcacctaccctggtcaaggtgttcaagcaaccatctaaacctgaaattgtaaacagagcagcgtttcttgaaacagagcagctaaaaaagttaggtgactgcatttcaagagacagttacccagacggcaacatcacgtggtataggaatgggaaagtgctacagcctgttgatggagaggtgtccatactttttaaaaaggaaattgatccaggtactcagttgtataccatgacttcctccttggagtacaagacaaccaagtctgacatacaaatgccattcacctgttctgtgacatattatggaccttcgggccagaaaacaatttattctgaacaagcaatctttgatatttactatcctacagagcaggtgacaatacaagtactgccaccaaaaaatgccatcaaagaaggggacaacatcacccttcagtgcttggggaatggcaacccacctcctgaggagttcatgttttacttaccagggcaggctgaaggcataagaagctcaaacacttacacactgacagacgtgagacgcaatgccaccggggactacaaatgttctctcatcgaccaaagaaacatggcagcttcaacaaccatcactgttcactacttggatttatccttaaacccaagtggggaagtgaccaagcagatcggtgataccctgcctgtgtcttgcacaatatctgcaagtaggaatgcaactgtggtgtggatgaaggataacatcaggctccgatctagtccatccttttctagtcttcattatcaggatgctgggaactatgtctgtgaaactgctcttcaggaggttgagggactgaagaaaagggagtcgctgaccctcatcgtagaaggaaaacctcaaatcaaaatgacaaagaaaactgatcccagtggactgtctaagactataatctgccatgtggaagggtttccaaagccagctatacagtggaccattaccggcagtggaagcgtcataaaccaaacagaggagtctccttatattaatggcaggtattatagtaaaattatcatttcccctgaggagaatgttacattaacttgcacagcagaaaaccaactggagagaacagtaaactccctgaatgtctctgcgataagtattccagaacacgatgaggcagacgatataagtgatgaaaacagagaaaaggtgaatgaccaggccaaactaattgtgggcattgtggttggtctcctcctcgccgccctcgtcgccggtgtcgtctactggctgtacatgaagaaatcgaaaactgcatcaaaacatgtaaacaaggaccttggtaatatggaggagaataaaaagctagaagaaaacaatcacaaaacagaagcctaagagaggagttgtttagatgtcctgagaaaaaaacatataaagaaattgaagcatgaacgtgattgtatttaagacatatacaaagacaatgacagcaattcatggttcaagtattaagatgttcatcctactaagctgtcctgggatcttagagaattatctcaagtaaaacaatgaaataaagttataaaattacaacaagatttggcagccatgataataggtcatatgttgtatttcgtttgattttccttttctgtaaatgtctgcactgaggatttctttcagtttgccttttatgtaaattttttacgtagctatttttatacactgtaagctttgttctgggagtggctgttaattggatgtacaatgtaatgtttatttcaattgtttatatggatagtctgagcaggtgcggttctgattctgattgctatcagtaatgccccaaactttcttgtgaggatctgaaacccaaaggtggcagttatgagattgggacatggatcttgcccaatcagaagctggttttttttttaaaaaaaaaaacctggagagtcaggagcaccataagatatgatggtctctatgtgccaacgggttccccgaagcgggtcacaaacacatacggcaacaccacatgtgaatgatacttttaaactgacaatttcgtcttctctgaaaaaagacatacacagagtttgtataacactttacttaacgacacttgctagaaaattacattctgtttttaaaaaaaataaggaaaatgtaaagaagaatatctaatatgtcagagaaagttggaaacaaatcacagctcgcatccccatagtcgcagatcacgatgtaaatcactgtaattaaaattggtgttaaatcctttgggttatccactgccttaaaatgacacttatttcctt

SEQ ID NO: 3683 - DNA, 1481 bp, Rattus norvegicus
  Genbank Accession No. NM_031755
ctagcaggcagcagagactatggagctagcctcggctcgtctcctcagagggcagattccctggaggggactactgctcacagcctcacttttaacctactggagccctctcaccactgcccaagtcaccgtagacgctgtgccacccaacgttgttgaggagaagagcgttcttttactcgctcacaatctgccgcaggagttccaagtcttttactggtacaagggaaccactttgaatccagacagtgaaattgcacgatatataagatccgataatatgagtaaaacaggacctgcatacagcggcagagagacaatatacagcaatggatccttgttcttccaaaatgtcaacaagactgacgagagagcctacacactatctgtgtttgatcaacaatttaatcctatacaaacgtctgtgcaatttcgtgtataccccgcattacaaaagcccaacgtcacaggtaacaactccaatcccatggagggtgagcccttcgtatcattaatgtgtgaaccgtacactaacaataccagctacctgtggagcagaaatggtgaaagcctctcagaaggtgacagggtgacgttctctgagggcaacaggactctcactttactcaacgtcaggaggactgacaaaggatactatgagtgtgaagcccggaacccagcgactttcaatcgaagtgacccattcaacctggacgttatctatggtccggacgccccagttatatcccctccagatatttatttgcatcaagggtcaaacctcaacctctcctgccatgcagactctaaccctcccgcacagtacttttggcttatcaatgagaagctccagacatcctcccaagagctctttatctccaacatcactactaacaatagcggaacctatgcctgcttcgtcaataacactgtcactggcctcagtcgcaccacagtcaagaacattacagtctttgagccagtgactcagccctccatccaaatcaccaacaccacagtcaaagaactaggctctgtgaccctgacctgcttctcaaaggacactggagtctccgtccgatggcttttcaatagccagagtctgcagctcacagacaggatgacgctctcccaggacaacagcaccctcagaatagaccctattaagagagaagatgccggggactatcagtgtgagatctccaacccggtcagtttcaggataagtcacccaatcaagctggacgtaatacgggaagtgaccatcgagatctcacagagcacaaaccctcaacctccagccacaatctgggtccttctgacgactctcctaacaaggtggatgacgtctcatactctgtcctgaacttcaatgcccagcaatccaaacgaccaacttcagcctcttcaagccccacagaaacagtttattcggtagtcaaaaagaagtgacattgtctgtcctgctgactgcaccagtg

SEQ ID NO: 3684 - DNA, 2754 bp, Rattus norvegicus
  Genbank Accession No. NM_031756
agacagcaagtctaagtctggaggttccactgattcggacctggctgcagagaggttcacctattccctgcagtcatggctgtccaccgtggctctgcacgagctgctcccgcctcagataaagtacagaaaaacaagcctgcacagacatcggggctggaacagggcagccgaatggcgagaatttttgggtttgaatgggcagatttatccagctggcagagtgtcgtgaccctacttaaccgaccaacggaccctgcaaacctggctgtcttccgttttctctttgcattcttgatgctgctggacatcccccaggaacggggccttagctccctggaccgaaaatacttggatgggctggatgtgtgccgcttccccttgctggatgccttgcgcccactgccacttgactggatgtatctcgtctacaccatcatgtttctgggggcactgggcatgatgctgggcctgtggtaccggctaagctgtatgttattcctgctaccatactggtacgtgtttctcctggacaagacatcgtggaacaatcactcctatctgtatggtttgttggcctttcagttgacattcatggatgcaaaccactactggtctgtggatggcctgctgagtgcccaaaagaagaatgctcacgtgcccctttggaactacacagtcctgcgtggccagatcttcattgtgtatttcattgcgggtgtgaaaaagctggatgctgactgggttgagggctactccatggagcatttgtcccggcactggctttttagtcccttcaagctagtgttgtcggaggagctgacaagcctgctggtggtacactggtgtgggcttctccttgacctctcggctggcttcctgctcttcttcgatgcctccagacccattggcctcgtcttcgtgtcctactttcactgcatgaactcgcagctcttcagtataggtatgttcccctatgtcatgctggccagcagccctctcttctgctcagctgaatggcctcggaagctggtagcccgatgcccgaaaaggctgcaagagctgctgcctgccaaagctgctcctcggcctagtgcttcctgtgtgtataagagggcccgggcgaaagctggtcaaaagccaggcctacgccaccatctgggaactgtcttcaccctgctctaccttctggagcagctcttcctgccctattcccatttcctcacgcagggttacaacaactggacgaatgggctgtatggctattcctgggacatgatggtgcactcccgctcccaccagcatgtaaagatcacctaccgtgatggcctcactggagagctgggctaccttaaccctggggtattcacacagagccggcgctggaaggaccatgcagacatgctgaagcaatatgccacttgcctgagcctcctgcttcccaagtacaatgtcactgagccccagatctactttgatatctgggtctccatcaatgaccgcttccagcagaggctttttgaccctcgcgtggacatcgtgcaggccgtgtggtcccccttccggcgcacgccttgggtgcagccactcttgatggacttatctccctggaggaccaagttacaagacattaagagcagtctggacaaccacactgaggtggtcttcattgcagatttccctgggcttcacttggagaattttgtgagtgaagacctgggcaacaccagcatccagctgctgcagggagaagtcactgtggaattggtggcagaacagaaaaaccagactcttcgagaaggagagaaaatgcagttgcctgctggagagtaccataaagtctatactgtatcatctagtccttcctgctacatgtacatctatgtcaacactacagaggtcgcactggagcaagacctagcatatctgcaagaattaaaggagaaggtggagaacggaagtgaaacagggcccctgcctccagaacttcagcctcttttggaaggggaagtaaaagggggccctgagccaacacctctggtccaaacctttctgagacggcagaggaagctccaagaaattgaacgaaggcgaaatagccctttgcatgagcgcttcctccgctttgtgctgcggaagctgtatgtctttcgacgcagcttcctgatgactcgaatttcacttcgaaacctgctatttggccgcccttccctagagcaattagcccaagaggtgacatatgcaaacttgcgaccatttgaaccagttgatgagtcaagtgcttcaaacacagattcttccgatcctcatccttcagagccagattctgagcatgttcactctgagctctgaggagtccagatgctgtgcagctacgggggaaggctgttacaggcttattgtctgtgcaaaggacagtttttgggagagaaatgattttgagagaggctttcacagtacagcccaggctggcctcaagctcatggtggtccctgtttcagcctgttttgtcattacatatatatctccagacttagttgtttttccctttacattttacccccttttaagttctttaaaattatagcttacaggatccaaggtaaaagagaagaatttgaatcccaagatttgaggtgcttttagtttttatacaggatttctctgtgtagacaagactggccttgctgacagatttaccagcctctgcctcctgggattaaaggaatgggacatcaaaaaaaaaaaaaaaaa

SEQ ID NO: 3685 - DNA, 5036 bp, Rattus norvegicus
  Genbank Accession No. NM_031760
tgaacttgaaaactggtgtacaatcctgactttccacagtggggtctctctcttctcctggctccgtcaagttcacatctgtagggtccaacttggatggcatggtgtaggctgctggtacctgatgaacctgaatttggaagactgaagaaagttgtactgtagcctcctctgagccaaaagctgaaaagcaagtaaaccgttctcaactgggctaagtttttgaaaagctggcaaagggttgttgagtgcagattctgcaatgtctgactcagtgattcttcgcagcgtgaagaaatttggagaggagaatcatgctttcgaatcagatggatcacataacaatgataagaaatcaaggttacaagataagatgaaggagggagacattcgagttggcttctttgaactgtttcgattttcttcatcaaaagacatctggctgatgcttatgggaggcgtatgcgcattgctacatggaatggcccagccaggcatacttattatttttggtataatgacagatatttttattaaatatgacattgaaaggcaagaactcgagataccaggaaaagcgtgtgtgaataacaccattgtatggatcaacagctccttccaccagaacatgacaaacggaacagtctgtgggttggtggacattgaaagtgaaatgatcaaattctctggcatctacgcaggagtcggcatgaccgtacttatccttggatactttcaaataaggttatgggtcatcactggggctcgtcagataaggagaatgaggaaaatttacttccggagaataatgagaatggaaattgggtggttcgactgcacttctgtgggagagctgaattcaaggtttgctgatgatattgaaaaaatcaatgacgccattgccgaccagttggctcatttcctccagcgcatgtcgacggctatgtgtgggttacttttagggttctacaggggttggaaactaaccttggtgattcttgctgtcagccctctcattggcattggggcagccgtcataggtctgagtatagccaagttcacggagcttgagttgaaggcttatgccaaagcggggtctattgctgatgaagtcctctcatctattcgaacagtggccgcttttggtggtgagaacaaagaggttgaaaggtatgagaaaaatcttgtgtttgcccagcgctggggaatttggaaaggaatggtgatgggcttcttcactgggtacatgtggtgtctcattttcttctgttatgcactggccttctggtatggttccacacttgtcctagatgaagaagagtatacaccagggacactggtccagattttcctctgtgtcatattagcagctatgaatattggccatgcatcttcttgcttggaaatcttctccactgggtgttcagcagctaccaatatttttcaaacaatagacaggcaacctgtcattgactgcatgtcaggagacggctacaagctagaccgaatcaagggtgaaattgagttccacaatgtgaccttccattatccttctagaccggacgtgaagattttagataacctcagcatggtcataaagccaggggaaacgacggctctggtgggatccagtggggctgggaagagtacagcattacagctcattcagagattctatgacccctgtgaaggcatggtgactctggacggccatgacattcgctctcttaacatccggtggctgagagatcaaatcgggatcgtggaacaggagcccgttctgttctccaccactatcgcagaaaacatccgttttggcagagaagatgcaacaatggaagacatagtccaagctgccaaggatgctaatgcatacaacttcattatggccctgccgcagcaatttgacacccttgttggagaaggaggaggccagatgagtggtggtcagaagcaaagagtagccattgcccgagccctcatacggaatcccaagatcttgcttctggatatggctacctcagcactggacaatgagagtgaagctagagtacaagaagcattgaataagatccaacatgggcatacaatcatctcagttgcccatcgcctgtcaacagtcagagctgcagatgtgatcattgggtttgagcatggagtagctgtggaaagaggcacccatgaagagctgctagaaagaaaaggtgtctacttcatgcttgtgaccctgcaaagccaaggagataatgctcacaaagaaacgagcataatggggaaagatgcgacggaaggtggcacccttgagaggaccttttccagaggcagctatcgggatagtttaagagcttcgatccggcaacgctccaagtctcagctgtctcttctgacacatgaccctccactggctgttgctgatcacaaatcctcttacaaagacagcaaggacaatgacgtgcttgtggaagaagttgaacctgccccagttaggaggattctaaaatacaacattccagaatggcactacattctggtaggatctttgagtgcagccattaatggggcagtcacacccatctactcccttttattcagccagctccttgggactttttcactcctcgataaagaacaacaaaggtcagagattcacagcatgtgtctgttctttgtcatcctgggctgtgtatccattttcacacaatttctgcagggttacacttttgccaaatccggagagctcctcacaaagaggctgcggaaatttggtttcaaggcaatgttaggacaagatatcggctggttcgatgacctcagaaataatcctggagtactgacgactaggcttgctacagatgcttcccaagttcaaggggctactggctctcaagttggaatgatggtcaattccttcactaacatcattgcggccttgctgattgccttcttctttagctggaagctcagtctgattataacgatcttcttcccctttctggctttatcgggagctgtacagacaaaaatgttgacgggattcgcttctcaagacaagcaagctctggagaaggctggtcagatcaccagcgaagccctcagcaatatccgcacagttgctgggattggagtggagggaagatttattaaagcatttgaggttgagctccagacatcatacaagactgctgtcaggaaggcgaatatctatggactctgctttgccttttcccaggggatagcatttcttgcaaattccgctgcctatagatatggaggttacttaatagcctacgaaggtctgggcttcagccacgttttcagggtggtctcttcagttgcattgagtgcaacagccgttggaagaacattctcttatactccgagctatgccaaagctaaaatatcagctgcacgcttttttcaactgctagatcggaaacctccaattaatgtgtacagtgaagcaggtgaaaaatgggacaacttccaagggaagattgattttattgactgtaaatttacgtatccttctcgacccgatattcaagttctgaatggtctctcagtatctgttaatcctgggcagacgctggcatttgttggaagcagtgggtgtggcaaaagcaccagcattcagctgttggaacggttctatgatcccgatcagggaactgtgatgatagatggtcatgacagcaaaaaagtcaacattcagttcctccgttccaacatcgggattgtctcccaggagccagtgctgtttgactgtagcataatggacaacatcaagtacggggacaacactaaagagatctccgtggagagagccatagctgctgcaaagcaggctcagctgcatgacttcgtcatgtcgctcccagagaaatatgaaactaatgttgggatccagggctctcagctctctcgtggagagaaacaacgcattgctattgctcgggccattgtgcgagatcctaaaatcttactactggatgaagctacgtctgccctagacacagaaagtgaaaagacagtgcagactgctctggacaaagccagagagggtcggacctgcattgtcattgctcatcgtttgtccaccatccagaactcagatatcattgctgtcgtgtcacaaggagtggtgattgaaaaagggacccatgagaaactgatggcccagaagggagcctactacaagctggtcatcactggagcccccatcagttgacctgactggagacttcacacagataatgatgtgctgagtacaggagggctgtgggtttttgtagtcatatagagaattattaatgctttacagacagaagtatccactgggatccaaagtaattttgagtgactttcagtaataatttcagtttgaaatgtctatgtagaaaggagagagcccagagtcagcatgagtcaaagttcaaagtccaaggtcaagtagctgcttatctgccggccagtgctgctctgggtagaaactggtcactgtctccatcgaggacgccgcggtgagagcaaggagtcctccttcaggacagagggttatctcttgcatctgggaaagctccctgcgcactgagcctgctctgtaatctgcactcaactgtttgagccagttcaaggccaagagctaaggacccaaggctactggtatttcttaactaagtttagtttgtttactataaggaagcaaatttatttacctttaactcctgtgagtagggtggggagccctttcctattctggcatctcccaggctcagggaggccaaggtgacaaaaggagaagtagaggtcgctggtcaggtgtgttgattgtaccgaaggctcagggtattggtgtcactgtacactacagtggatctgccagtgtgaagcaggggctctctaccaggacttcgacttttcattccctgccaccatgtcacctgatgtcccttactcttaggaaattctatgcatggaatggaaatgcatccgaatcttaagttgttacataaaaaaatctagtaaaacatagtagg

SEQ ID NO: 3686 - DNA, 861 bp, Rattus norvegicus
  Genbank Accession No. NM_031774
gaattcggcacgagcgcgctcgggtggggccgcctaggtgctgctgggctcggggatatttacagcggttctattcactgcagcgcgaacatggcggcccagaaggaccagcagaaggatgccgaagtggaagggctgagcgccacgaccctgctacccaagctgattccctctggcgcaggtcgagagtggctggagcggcgccgtgctaccatccggccctggggcaccttcgtggaccagcaacgtttctcgcgaccccgcaacgtaggcgagctttgccagcgcctggttcgcaacgtggagtattatcaaagcaactacgtgtttgtgtttctgggcctcatcctgtactgcgtggtgacatcccccatgctgctggtggctctggctgtcttctttggcgcctgttacattctctatctgcgcacgttgcagtctaagcttgtgctctttggccgtgaggtgagcccagcacatcagtacgccctggctggtggtgtctctttccctttcttctggctggccggtgctggctccgctgtcttctgggtcctgggagccaccctggtacttataggctctcacgctgccttccaccagatagagcctgcagatggtgaggaactgcagatggaacctgtgtaaagtgtcctccaggacctgccagcctctcctgccggcctctcctgcccgtggctgtcccctctctgtctgttcttgccctacctgacctagacactcagctcaactcagagcctaactctgagccttccaccctagacctcaaacccggggagaggcttttatcttcggaaataaaacagttacaattgaaaaaaaaaaaaaaaaaaactcgag

SEQ ID NO: 3687 - DNA, 1568 bp, Rattus norvegicus
  Genbank Accession No. NM_031776
aagagccagcagctccccgctctgcagccacagggaccgaccgctctgcgcccgcccggtgcaccctctttggtcagtgaacttgcgctgccccgctgctgccatgtgtgcggctcggaggcgcgagctggcgctcatcttccgagggactttcgtccactccacctggacctgccccatggaggtgcttcgcgatcaccttcttggcgtgagcgacagcggcaaaatagtgtttctagaagaatcatctcagcaagaaaagctggccaaagaatggtgcttcaaaccgtgtgagatcagagagctgagccaccatgagttcttcatgccaggccttgttgatacacacatccatgcccctcagtatgcctttgctggaagcaacgtcgacctgccacttttggattggctgaacaagtatacatttcctacagaaaaaaggttccagagcaccgatgtggctgaagaagtctacactagagtcgttaggagaacactaaagaacggcaccaccacggcatgctactttggaacaattcacactgactcatccctgatccttgcggaaattacagataaatttgggcagcgagcatttgtgggcaaagtatgcatggatttaaataacactgttccagaatacaaggagaccaccgaggagtcagtcaaggagacagagagatttgtgtcagaaatgcttcaaaagaattattcaagggtgaaacccatagtgaccccgcgattttctctttcttgcacggagactctgatgagtgaacttggcaacatcgccaagactcatgatctgtacatccagagccatataagtgaaaatcgtgaagaaattgaagctgtgaaaagcttataccctggctacaaaaactacacagatgtctatgataaaaacaatcttctgacaaacaaaacagtgatggctcatggctgctacctttctgaagaagagctgaacgtcttcagtgaacgaggagcatccattgcacattgtcccaactctaatctgtcgctgagcagtggcttactgaacgtgctcgatgtcctgaagcataaagtgaagatagggcttgggacagatgtggctggtggttactcctattccatgcttgacgccatccgaagagcagtgatggtttccaacgtcctcttaattaataaggtgaatgagaaaagcctcaccctcaaagaagtcttcagactagccactcttggaggaagccaagccctggggcttgatcgtgaaattggaaactttgaggtcggcaaggattttgatgccctcttgatcaaccccagagcatcggactctcccattgatctgttttgtggggatttcgttggtgatatttctgaggctgttatccagaagttcctctatctaggagatgaccgaaacattgaggaggtttatgtgggtggaaagcaggtcgttccattctccagctccgtgtaaggcccttggacatccatgacgctctcctgggaggacatgagtctgctatcttccttgtacccagggaccgatcagaaagtatattcaaaaaaaaaaaaaa

SEQ ID NO: 3688 - DNA, 1939 bp, Rattus norvegicus
  Genbank Accession No. NM_031781
accatggcttgtctacgagttccgcactcagagccctcgtcttccagcttggtgacaatgccggcctgaacctggatcccagacatggagttcctgccagaaccccagcatcccccagggcccccgaccatggacttggaggagcccaaaggccccgaggttccctctgaggaccatccctctaacacgcagggggccttagggcccagaggccccgataccctgagcgagatggagctggacacatccagtgtgcgggcgctggttcagcagttggaagctttgcccagcgacctgggtggccagttcccagatggagccccctgtcccctgcacattgccactggccaaggcctagccacccaggagaatttggatgctggtgggctcctgtcagccgaggcaggtggggacaaccttctgggtctgctgaggtgtgaggcctctttgcctgctcaatccgttcccccagatcctgcacaggctgcaccccgccttctgcagccaccagaggaccccggtggggaccctggatggatggaagggacagagccagcagacaacaggagttccagcagctccccggagctgtggctagagacagcacccctggtgacacatcgagatccacccgtgggtacccagagccaggagaccctggcttcgtgccctgccgtctccgaggttccaggtccctgtggacaggaggagctcatggacggagtcctcttcggggcgaaatacctgggctccacccagctgctgtctgagcgcaacccgccgcccagcacacgcatggggcaggcgcaggaggccatggatcgggtcaaggcccctgaaggtgagagccagcccatgaccgaggtagacatctttatctccactaagcgcgtgaaagtgctggctgctgactcccaggatgccctgatggaccatgccctgcagaccatctcctacatcgcggacattgggcctgtgctggtcttgatggcgcgcaggcggctggccaagaggacaacttctcaggaccgccagcggcagctctacaagatgctatgccatgtcttccattcagaggatgcccagctcattgcgcaagccatcggtcaggccttcagtatcgcctacagccagttcctgcaggagaacggaatcgaccccagccaggtgggcatgcagccttcagcctctgccagtcacccacacaatggcgacctggaccacttctgcaacagccagaactgcagggaggtttgcatccagaagcggcctggggagggcctgggtgtcgcgctggttgagtcaggctggggctcgctgctgcccaccgcggtcattgccaacctcctccacgggggccctgccgagcgctgcggggccctgagcataggggaccgtgtcactgccatcaacggaaccagcctggtggggctgtcgctggccgcctgccaggccgctgtgcgcgaggtacggcgacactcatccgtgacgctgagtatcatccattgcccaccagtcaccacggccgtcatccaccggccccacgtgcgcgagcagctgggcttctgtgtggagaacggcattatttgcagcctgctgcgtgggagtgcggctgagcgtggtggagtccgcgttggacaccgcatcattgaggtcaatgggcagagtgtggtggccatgccccacgcgcgcattatccagctgctcacagagacaagagaaatccacatcaagaccatgccagctgccacctaccgactgctcacgggacaggaacagccagtatacctgtgatcgccccgcccacatgtgccttcgccccgcccacgtgtgccttcgccccgccaccgtcacccctcggccggcggggaccaaagaatcctcagtcttgtgctattttctaatgtaaaaaatacttttaaagatttattaaatggtc

SEQ ID NO: 3689 - DNA, 2089 bp, Rattus norvegicus
  Genbank Accession No. NM_031785
ctatgatggcggcaacagtggtatctcggatacgaaccgggacacggtgggctccagtcctgtggctgcttctgtcgttggtggcagtggcggcagcagtggctgcggagcagcaggtgccactggtactgtggtcgagtgaccgggacctctgggctcctgtggccgacacacatgagggtcatattaccagcgatatgcagctttctacctacttagaccctgccctggagctgggcccccgcaatgtattgctgttcctgcaggacaagctgagcattgaggatttcacagcatacggtggtgtgtttggaaataaacaggacagtgccttttctaacctggagaatgccctggacttggccccctcctcactggtacttcctgctgtggactggtatgcaatcagcactctgaccacctacctacaggagaagcttggagctagtcccttgcatgtggatctagctaccctaaaggagctgaagctcaatgccagccttcctgccctgctgctcatccgtctgccctacacagccagctccggtctgatggcgcccagggaggtccttacaggtaatgatgaggtcatcggacaggtactgagcacacttgagtctgaagatgttccttacaccgcggctcttactgcagtccgcccttctagagtggcccgtgatgtagccatggtggctgggggtctaggtcgccagctgcttcagactcaggtggcatcacctgcgatccatcctcctgtgagttacaatgacactgccccaaggatcctgttttgggcacaaaacttctctgtggcatacaaagacgaatggaaagacttgacctccctcacctttggtgtggagaatcttaacttgaccggctccttctggaatgactcctttgccatgctttcactgacctatgaaccactctttggtgcaacagtgacattcaagttcattctggctagtcgcttctacccagtatctgcccgatattggtttaccatggaacgacttgaaatccacagcaatggctcggttgcccatttcaatgtttcccaagtcacaggacctagtatctattctttccactgtgagtacgtcagcagtctgagcaagaaaggcagtctccttgtgaccaacgtgccctccctctggcagatgactcttcataacttccagatccaagccttcaatgtgactggtgaacagttctcctatgctagcgactgtgctggcttcttctctccgggcatctggatggggctgctcaccaccctcttcatgcttttcatattcacctatggtctgcacatgatactcagcctaaagaccatggatcgctttgatgaccgcaagggccccaccatcactttgacccagattgtgtgacatataccagagagggattgagggagtattggtgtctaggtttccattttgtgacacagtggatggaaaggtttgtcctcttcctactatagcatgaaccctacatacaccaccctcagcctgtcttgcttcctctttcctggacagggacttccctgaggctatcccccacttctaccaacaaagtgtattattcttcatagataaatcttccaggcttcatcaagaggggaagggaccttaattctagggtgcccccctttccctttctccttatttattcttgcccctctgctattatttcgtgctgtttatagtgcttttgtgtagtaaatactcactccccaagctttatggagctttccagcaatagccatgaacttgaggtcccttgaatttgagaggtgtggaaaggctagttaactgtccagcttagcctttatgggttttttttttttggcgggtgggggttaagaatgagcggtacactggggtttatttctgtgacctgagaaggaagaaatcaccacgagaactggagaaacaaagtgtactcattgggtttctggtttgttctcacaaggattgcctgtcaagaagccagaagtatgtgtgtgtgtgtgtggggggggtgtgctctgttgtttcattcctaataaaataaagacgtgttgccatgaaaaaaaaaaaaaaaa

SEQ ID NO: 3690 - DNA, 4120 bp, Rattus norvegicus
  Genbank Accession No. NM_031787
aaggttgcgcaacggctcttcccagcaaccgaagttttgtttggtcccacggggggccccctctttcagctcggtggctctaggccgtcactacggagacctcgttcctttcattgatgggagcgaacaccaacgtgcacacacgccgccggakcgcccagccccgtggctgtgccgcggaggcttggtggccctgtcaccggcgtcgcggggcggcgggtttggagggtgtcaactctggggacgtgcgtgcgtgtgattgttggggaggagaaatgtgatccgcggcttcgcgtccccagcggcggcgggaggaaggcgtggcggccgcgcggcggggctgttgccggcttctctcgttacggcggcggcggccctcttcccttcgcgctgggggagatcagcggaaaggactcgggaccagaatgtctgttttcctgtctgaggggagacggctgttgtaaaatggtatggcctcacaagtcttggtctacccaccatatgtttatcaaactcagtcaagtgccttttgtagtgtgaagaaactgaaagtagagcccagcggttgtgttttccaggaaagagcctgccctcagatccatgtgaatggtagacactttggaaatcctcttccttccacgaagggtagtgctttccagacaaagataccattctctaaacctcgaggacacagcttttcactgcaggcaggggccattgttgtcaaagacactgccggtgctacaaaggtcatagcagctcaggcgcagcaggctggagtggaggcacctcgggccgtggtgtggagaaacaggctacatttcctaggaggtccccagcgatgcgggttaaagcgcaagagtgaggagttggataatcacagcggcgcgatgcagattgtcgatgaactgtccatacttcctgcaatgttgcaaaccaacatgggaaacccagtgacagttgtgacagcgaccacaggatcgaaacagaactgtaccagtggggaaggtgactatcagttagtgcagcacgaagtcttgtgctctgtgaaaaacacatatgaagtcctggattttcttggtcgtggcactttcggccaggttgttaaatgctggaagagagggacaaatgaaattgtagccattaaaattttgaagaatcacccttcgtatgcacgtcaagggcagatagaagtgagcatcttagcaaggctcagtactgagaacgctgatgagtataactttgtgcgagcctatgagtgcttccagcaccgcaaccatacctgcctggtctttgagatgctggagcagaacctgtatgacttcctgaaacagaataaattcagtcccttgcccctaaaggtgatccggcccgttcttcagcaagtggccactgcactgaagaaattaaaaagtcttggtttaattcatgctgaccttaaaccagagaatattatgttggtggatcctgttcgacagccatacagggttaaagtgatagactttggatcggccagtcatgtatcaaagactgtttgctcaacgtatctacaatctcggtactatagagctccagagattatattggggttgccgttttgtgaagccatagacatgtggtcactgggatgcgtgattgcagagttattccttggatggccactctacccgggagccttggagtatgaccagattcgatacatttctcagactcaaggtttaccaggagaacaattgttgaatgtgggtacaaaatccacaagatttttttgcagagaaacagatatgtctcattctggttggaggttaaagacactggaagagcatgaagcagagacaggaatgaagtctaaagaggccagaaagtacatattcaacagtctggacgatatagtgcatgtgaacacagtgatggacttggaaggaagtgatctcttggctgagaaagctgatagaagagaatttgttagtctgttgaagaaaatgttgctgattgatgcagatttaagaattactccgatcgagactctgaaccacccattcgttagtatgaagcacctactagattttcctcacagcagccatgtaaagtcctgttttcatatcatggatatttgtaagtctccgagttcatgtgaaacaaacaaccacagtaaaatgtcactcttacgaccagttgcatccaatggcactgctgctctagcggcaaactttactaaagtcggaacattaagaagtcaggcgttgaccacatctgctcactcggtcgtgcaccatggtatacctctgcaggcggggaccgcacagttcggttgtggtgatgcttttcatcagaccctgattatctgtcccccagctattcaaggtattcccgcagcacatggtaagcccaccagttattccataagggtggacaacacagttccgcttgtgactcaggccccagctgtacagcctctgcagatccgaccaggagtcctttcacagacatggtctggtcgaacacagcagatgctaatacctgcctggcagcaggtaacacccatggctcctgctgctgcaacactaacttctgaaggcatggctggttcacagaggcttggagactgggggaaaatgattccacacagcaatcattataactccgtgatgccgccacctcttctgaccaaccagataacattgtcggcccctcagcctatcagcgtaggcatcgcacatgttgtctggcctcagcctgccactaccaagaaaaataagctgtgccagaacaggagtaattcattgcagaacaccaatgtcccacattcagcatttatttctccaaagataatcagtgggaaagaagttgaggaagtaagttgtgtagaaacacaggacaatcatacctcagaaggagaggcaagaacttgccatgaagcgtctgtcagacaggattcttcagtttcagacaaacagcggcaaaccatcatcattgccgactccccaagtcctgccgtgagtgtgatcaccattagcagtgacactgatgacgaagagacctcacccagaccttcactccgagagtgtaaaggtagtctggattgtgaagcttgccaaagcactttgaatattgatcggatgtgttcactcagcagtcccgacagcactctgagtaccagctcctcagggcagtccagcccatccccttgcaaaagaccgaacagtatgtcagatgatgaacaggaaagtgggtgtgagactgtggacggctctccaacgtcagactcctcggggcatgacagtccatttgcagagagcagttttgtggaagacactcctcaaaacccagagctggggacttgtgctggcacagaggccaagccagctcttagcactgctgtggagccaccagtggggacagagcgtggcctgaacgtcgatgcgcacatggccaacacagattctacatgccagccattgacaaaaggccagcccgcccctggaaagctgaaccagccctctgcctcggctgctcgtcagcaaaagcccacatcagcattccagcagcagcatttgaacctgagccaggttcagcatttcggaactgggcatcaagaatggaatggaaactttgggcatcgaagacagcaagcatatattcctactagtgttaccagtaatccattcactctttctcacggaagtcccaaccacacagcagtgcatgcccatctggctggaagtgcgcacctcggaggacagcccactctgcttccgtacccgccatcaactgccctcagtagtgctgcacccgtggcccacctcctagcctctccgtgtacctcaagacctatgttacagcatccaacttataatatctcccatcccagtggcatagttcaccaagtccccgtgggcataaatccccgcctgttaccatccccgaccattcatcagactcagtacaaaccaatcttccctccacattcttacattgcagcatcgcctgcatatactggatttccattgagtccaacaaaactcagccagtatccatatatgtgaaaactcgaaagcagtttattgaggaagctcaatgatacaaacgtttgattaaaaataaaaacatggtatggaat

SEQ ID NO: 3691 - DNA, 1740 bp, Rattus norvegicus
  Genbank Accession No. NM_031797
tggaacacgggttggggcggcagctgaagacgccaacttaaaagcgccgtagccagaacccaggcagcagtgtgtccattgtccagaactcatctgagaaactgccacaggaagtgctgctctgctccagtctggtcactgaaaagggagctccaggacctgcaggatgggggcaggctgtgtcaaagtcaccaagtacttcctcttcctcttcaatctgctgttctttatcctgggtgctgtgatcctgggctttggggtgtggattcttgcagacaagagcagcttcatttccgtcctacaaacctcatccagctcgctgcaggtgggggcatacgtcttcattggtgtgggcgccatcaccatgctgatgggcttcctgggctgtattggtgctgtaaacgaggtccgctgcctgctgggtctgtacttcgtctttcttctgctgattcttatagcacaggtgactgtagaggtcctcttctacttcaatgctaacaagctgaagcaggagatggggaacacagtgatggacattattcagaactacagcgtcaatgccagcagcagccgcgaggaggcttgggactatgtgcaggcgcaggtgaagtgctgtggctgggtcagcccctccaactggacacgtaacccggtgctcaagaactctaccaagaccacttacccatgctcctgtgagaagacgaaggaggaggacaaccagctcattgtgaagaaagggttctgtgagtctgacaacagcaccgcaagtgaaaacagtcctgaggactggcctgtgcacccggaggggtgcatggagaaggctcaggcgtggctacaggagaacttcggcatccttctgggcgtgtgtgctggtgttgctgtcattgagctgctggggttgttcctgtccatatgtttgtgccggtacattcattctgaagattacagcaaggtccccaagtactgaggctgctgatgtccccactgtcctgtgtttctccaccctcagtctcccacagggcctctagagctttcccacatgagccgtgctccatctactactgaggcctctggcccaccctgggaaggttgtaggaactttctgggcctgggcccttctccctgcctttctgccaccaatatggggcccttactgtcctgtagctcttcctcctactgcctggaatatttttaacagcttgaaatggctcccagtattactgtacacaggatagctgggtccccaccctgaagtcatattataacaatataatattaaaaaccagggagggctagcacccatggctgcccagggaaaggccacaggaaaggttagtggtttccccactgtgacactttctttatgggttttcaatgtttctgtgggagacagggtaggcagttcttgtacacacttggaatactccccccaagctcagttcagcagggaactgaacggagaggctgcctgggggactggcccaggtagcccccagtgagcttttccttggtgagggacctgacagcttaggggcatgggtccctcaggtctggcataagaccctgagttgtctggacaagagaaggaggatctggactggtatttcttggcagctgtcccctgtcccctgggctaagggtgggtgaggctgtgccttgcagggtgggggagggtttccatatgctcatctctgaaatcaactattaaaggaggatttgtaacaaaaaaaaaaaaaaaaa

SEQ ID NO: 3692 - DNA, 1057 bp, Rattus norvegicus
  Genbank Accession No. NM_031811
atgtcggggtccccggtaaagcgccagaggatggagtccgccttggaccagctcaagcagttcaccaccgtggtggctgacacgggtgatttcaacgccatcgatgagtacaagccccaggatgccaccaccaacccatccctgatcctggctgcagcacagatgcctgcctaccaagagctggtggaggaggccattgcctacggcaagaagctgggtgggccacaagaggagcagattaaaaatgccattgataaactttttgtgctgtttggggcagaaatactaaagaagattctaggccgtgtatccacagaagtcgatgcaaggctttcctttgataaggatgccatggtggcccgagccaggcgcatcatagagctttacaaagaagctgggatcagcaaggacagaattctcatcaagttatcatcaacctgggagggaatccaggccggaaaggagctggaggagcagcatggcatccactgtaacatgacactgcttttctccttcgcccaggccgtggcctgcgctgaagcgggcgtgacgctcatctctccctttgtggggcgcatccttgactggcatgtggcaaacacagacaagaaatcctacgaaccccaggaggaccctggggtgaagagtgtcacaaaaatctacaactactacaaaaagtttggctacaagaccattgtcatgggtgcttccttccgtaacacgggtgagatcaaagcgctggcaggctgtgatttcctcaccatctcacccaagcttctgggggagctgctcaaggacagcagcaagctggcacccacgctttccgtcaaagcagcccagaccagtgacttggagaagatacatctggacgagaaggccttccgttggctgcacaatgaggaccaaatggctgtggagaagctctctgatgggatccgcaagtttgctgctgatgccataaagttggagcggatgctcacagaacgaatgttcagcgctgagaatgggaaatagtgcagcacctgagactggaccgcagtcctgcaccgaggctgac

SEQ ID NO: 3693 - DNA, 2836 bp, Rattus norvegicus
  Genbank Accession No. NM_031812
gggctgaggacacgatgtcgggcgcctcccgcggactgttctgggccgccacctgcctcgccgcgctctgcctgtcggccgcgcagagcaacagcagcgcatctcccaacgtgactgacccgccgaccacgaccagcaaagtggtcccgacgacgctcaccaccaccaagccgccagaaacctgtgagagcttcaacagctgtgtttcctgtgtcaacgccaccttgactaataatattacctgcgtctggctagattgccatgaagcaaataagacctattgttcaagtgaattagtaagtaattgtacccagaagaccagtactgactcctgttctgtaatacctaccaccccagtgccaaccaattctacagctaagcctacaactcggccttcctctcctacacctactccctcagttgtcacatcagcaggtgcaacaaataccactgtgactccaacctcacagcctgagcggaagtccacctttgatgcagccagcttcattggaggaatcgtccttgtcttgggtgtgcaggctgtaattttctttctctataaattctgcaaatctaaagaacgaaattaccatactctgtaaacagacccattaaattaatgtggactggcagttaacttgtgtaactcaactgaaaccaaaatattccagaagtcccacatggaagacgctgttccaggacctttacatttccagaggatgcatacaggatattgtggagcactatccttgaagaaaagtcagttaaaccattttgctcaacaggaatatttaaaatattctgcatgaatccatatggctgtcgtcttttgtttaaaatggctgctgctgtgggattgtgtttttccctctgacatgccaaatgtaacttcctgtaagttatggaaagtgctgtcctgtgcaggcagcttctgactctgcagtctaaatgtagtccctagcaacctagagtctgttattttcgtcctaacttgagatgtcacttagtggccagaattgagaagagtgccaagtgaccacccgtcaagcagattgagggccatcgcttcagacatggattaaatttatttagttctaaactacccctagagtaaaattttgtgcttgataaattgtattttatatattaaaaataagatgccacacggcattccagacttagaataaggaaaaggatacatagacagtaatacgcagcaggtcttgttcatactcataaagtaccatattaagaaatagaacagtgccttaagacagaccaagatgtcagcagaacggaaaatgtgttcacactgggaggcaaagcttggtctgagaatgtaatgttggtgtgagcagcagaaacctgcttttagataacatactgttaatatttaattaaaaccattggtttttccagagctgagaactagaagctaaagaataattctaagctgaaaggcttccttctatcaaaccatctaacattttcttagggctattgaatagatataaaatcgatttctctttctctctgtacacagtgtatccaaatattataccttaaggattcctaccaggttttcctgagaagtagcttttatgtgaggcaagaaagaagtaggttgtaggtagaatcattttctagttctttaaatgagacaatcactttgttttctaatagttgtgatctgtgtagcttaaagaaaccttagggtttgcaagagattgctatagatttccagtgatgatgccctggctgaataggcttgtctctcctttagcctgtacctcttttcttcctccttggtttcagtccccatgtgctataatcatgcaaacttttatttcaatagcttctgtcaagcactaagtttgcagtcctggggtcgcttcccccttgcctctgacacactgcactagtctagagggtgtcattggaaataggctttggtttcctgcctcatgcaagtgtgtgcttgcttgtttgtttagagtagcacagtttagcacttggtttccagggttttataatagaaaaggcagtttgatgtgaattggttcataaagtgaaacgaatgacgtctctatttccttgtcacttgctggtacagctgaagtttgttttacttgcacatttgtacatatatctaatgttttcaagtgccttacttgtttaaactctggcttcagaggttttgggggaaagataggtttacctcacagttagtttccattataatctaggttcctcacacaaatctatttcagtgccatggctgttagttttcagtgagtgctcaagttcttttgaaagtacacagaattcccattccttaaaaaggtggcaaaatcagtttgtcatttgcttccatgtgactccttgcaccatataaatgtcagcgtatgtaacaagttttatgagaatgtaacttaatttgaaggtcctgtaattttgagcactgctctaacactgtaggaagttagtgacagtttgcaggtctctacataagctctcgccacagagttcacagctgccctgactctttcccatttttgtttagcaaggtagtattttgagccatcagtgattttgggttttttaatccagaaggtatgtagaaacctttcagagttttcatctgatttgtccggaggctctagttctgtcaaataccttatttcacctttcctatatttgctgcacaagcagacactgctgtacttagaaatttctatttgagttcattaaaaaactacaaaactaatgtgtatgcgtatcaaactgatttaaaataaatatgtttattagtctcttgaaaaaaaaaaaaaaaaaa

SEQ ID NO: 3694 - DNA, 3236 bp, Rattus norvegicus
  Genbank Accession No. NM_031814
gcccgcgccccccacgctggcccagagggctgcggccgcttcgccgctgaggatgtcccggaaggggccgcgagcggaggtgtgtgcggactgcagcgcccctgaccctggctgggcatctatcagcagaggtgtgctggtttgtgacgagtgctgcagtgtgcaccggagcctgggacgacacatctccattgtcaaacaccttcgccacagcgcctggcctcctacgctgctacagatggtgcacacgcttgccagcaacggggccaactctatctgggagcattccctgctggaccctgcacaagtgcaaagtggccggcgcaaagccaacccccaagacaaagtccaccccatcaagtcagagttcatcagggcaaagtaccagatgctggcgtttgtgcacaagcttccctgccgtgatgatgatggggtcaccgccaaagacctcagcaagcaactgcactcgagtgtgcgaacaggcaacctggagacctgtctgcgcctgctttccctgggtgcccaggccaacttcttccacccagaaaagggcactacacctctacacgtggctgccaaggcagggcagacactgcaggctgagctgctagtagtgtatggggctgacccaggctcccctgatgtcaatggccgcacacccattgactatgccaggcaggcggggcaccatgaactggcagaaaggctagttgagtgccagtatgagctcactgaccggttggccttctacctctgtggacggaagcctgatcacaagaatgggcattacatcataccacagatggctgacagatctcggcaaaagtgcatgtctcagagtttggatctgtctgaattggccaaagctgccaagaagaagctacaagcactcagcaaccggctctttgaggagctcgccatggatgtgtatgacgaagtggaccggagagaaaatgatgcagtgtggctagctacccagaatcatagcaccctggtgacagaacgcagtgctgtgcccttcctgccagtcaaccctgaatactcagccactcggaatcagggacgacagaaattggctcgttttaatgcccgagagtttgccaccttgatcatcgacatcctcagtgaggccaaacggaggcagcagggcaagagtctgagcagccccacagacaacctcgagctgtctgcacggaaccaaagtgacctggacgaccagcacgactacgatagtgtggcttctgacgaagacacagaccaggagcccttgcccagtgctggcgccacgcggaacaatcgtgccaggagcatggactcctcagatctgtcggatggggctgtgacgctgcaggagtacctggagctgaagaaggctctggctacctccgaggccaaagtgcagcagctcatgaaagtcaacagcagtctgagtgacgagcttcggaagctgcagagggagatccacaaactgcaggcagagaacctgcagctccggcagccaccaggaccagtgcctgtaccctcacttcccagtgaacgggcagaacacacactcatgggccctggtggaagtacccatcgcagggaccgccaggccttctctatgtatgagccaggctccgccctgaagccctttggaggtgcacctggggatgagctcgccacacggctccagcctttccacagcacagagctggaagatgatgccatctattcagtacatgtccctgctggcctttaccggatccggaagggggtgtctgcctcttctgtgaccttcactccctcctccccactgctgtcaagctcccaagaaggaagtcgccatgcgagcaagctttcacgccacggcagtggcgcagagagtgactatgagaacacacagagtggagagcctctgctgggacttgaagggaagcgattcctagagctgagcaaggaggatgagctgcacgctgagctggagagcttagatggagacccagaccccgggctccccagcacagaagatgtcatcctaaagacagagcaggtcaccaagaacattcaggagctattgcgggcagcccaggagttcaaacatgacagctttgtgccctgttcagaaaagatccatttggctgtgactgagatggcctctctcttcccaaagaggccagccctggagcctgtgcgcagttcactgcggctgctcaacgccagcgcctaccggctgcagagtgaatgccggaagacagtgcctccagaacctggcgcccctgtggacttccagctactgactcagcaggtgatccagtgcgcctatgacatcgccaaggctgccaagcagctggtcaccatcaccacccgagagaagaaacagtgaccactttccctgcccttacccacaccctgggacctcactggccatgggagctgggccactccagacactaacccacccccaacagagccactggcacaagtgcccttagtgccaccattctcctctggcatccaggtgccctggtgtccacacccccttaagccccaaggatgggaatgtgaggtgacaggaccatctgtcccccacattccacgcccctccctctgtacatagcatccctgccctgctgatacgcaggagcctcaaggagtccctcccagctcttcacctgccttccagggccccctcagcaaagggtgggacagggacactccaagtggggcagccccgcctactgcaccctatccccatgagccagttcagccctggggggtcgagcagaggcaccccctcctttgtgcattatctmtgggtgtytytgccccgtagccagcagcccccccgctgctctttcatgacaaatggcccctgccagagcacaggccccaacttgtgtgccagggtccccagcagcaaacactggaacgtctttctctcccctaccccttaattttaactttgtggtaactgagtgtccctgcgttcttacaactgagtgtgtgagcggcagtgccgtgccagagacctggtccacctggagctctgaggggcaggggaaccagagtagtgggaccagcattggaagtcagcttccctctacccaacctgggacggggactgtcagggtcaccagctgtggtccagttgctacccctacttgtatccctatcctataaacttaaaaggaaaaccacttccctccatctctccccatcccctgtgggaagtgtgctgaccaggcagaggacag

SEQ ID NO: 3695 - DNA, 2600 bp, Rattus norvegicus
  Genbank Accession No. NM_031815
  misc_feature (1)..(2600): n = a or c or g or t
gcgatctactctcagtcttcctgagtcacaggctaccaaggacaagtagctctgtctgccctttgttgaggggagctgtgacactggtttgctgctgctgctgctgctgctgctgcatcttctttgggaaatcagactcaataaactgccatccatctgaggttctcaactcagagccatctacctggagcatgggactttcaaatgtccagctctggacaatactgctgtgggcattggcatgggtgcagagtacaagatctgcgtgcccgtcctgtggggccccaactctgacaccccaaggagaacgcgctctggtcctagagctagccaagcagcaaatcctggagggactgcacctaaccagccgtcccagaataactcgtcctctgccccaggcagcactgaccagagccctccggagactgcagcccaggagcatggtccctggcaaccgagagaaagtcatcagctttgctaccagcatagacaaatccacttcaacctaccgctccgtgctcaccttccaactgtcccctctttggtcccaccacctgtaccatgcccgcctctggctgcacgtgcctccctcttttccggccactctgtatctgaggatcttcggttgcggtaccacgaggtgcagaggatcccgcacgttcctagctgagcaccaaaccacttcctccggctggcacgccctgactctgccctctagcggcttgcggagtgaggaatctggagtcacaaaactccaactggaattcagacctctggaccttaacagcactactgccagactgccacggctgctgttggacacagcgggacagcagcgtcccttcttggaacttaagatccgagctaatgaacccggagcaggccgggccaggaggaggactcccacctgtgagtctgagacccccttatgttgtagacgagaccactatgtcgatttccaggagctggggtggagagactggatcctgcagccggagggataccagctgaattactgcagtgggcagtgcccgccccacctggctggcagccctggcattgctgcttccttccattctgctgtctttagcctcctcaaagccaacaacccttggcctgcgggttcttcctgctgtgtccccaccgcgcgaaggcctctctccctcctctaccttgaccataatggcaatgtggtcaagaccgatgtgccagacatggttgtagaggcctgtggctgcagctagcaagaggacctgaaggttttgagtgaagttcaaggttcaagttgggggttcccaagcaaaagggtcctgtgtctggaagcacaagttccggatccatactgacacccaacaagctgtgtagcagtatgcctgagtttgacccctgtggaactcaaatgggcatttttcttgtcccagattctggcctatttcaggctgtttcaaatgtggacagatgggtaaaacgtttcctttcgagaaactgcctggccagcaccatttcctacatcaagccctgttccaggacagcaggggatgccgtgggagggaaggaagaatgcagggaaaactacttagtctctcccgaaaaagaattcctcaagtaataaaggaggaattagaaggttaggcagattggggaaaggtatacaggctaagaacagggactgttgcctgctttgagcaaggtcaagaggaatatgagcaggcantgaggtgggagagcagttaggaggccctggaattgacagtcagtaaaaaggggtgctgaacccataagttctctagcttccccttggggagaggacccatgtaaatgacatacgtttatattttcttaataaaaaggagaaagaaaagcaacagtgtgtaaggggttgttaaaatgagccagaaacaaagtgtggtctggggacctctgtgcttcggggccttttcaaggggttttcaaactatttgcataatcacatagagaagttatttgtcatttactatcattattttttcattgttctgtgggaacagggtttacacttataactacagccctcaggaggctgagacaggaggatcgccgtgagttcaagaccagccttcatagtgaatgctgggctagcctgagctatggagtgagatcctgtctcaaagcaaaagaaacaaacaaaacaacaaagactaagtagtgagtctttccagagtgtattatatgatacagccgatgacattgtggcttatatattctcctttctctcctttaaacaattttatttatttttattgtatgtgtatgatgagtcttaggcctgcaccggcttgcagtgcccatagaggtcagaagaggacgctggatccttggaactaaagttagagcagtgtgagctgcctgtgtctgttaacagaactcaggtccacagtaagagaaacaaacaattaaaggctgagctacctctccacctgagacatgtgcacacacagtcacacattgttttgttttgtttggaaacagcccacgctatcttggaactctcaatcctcctgcctcagaccctcctgccctggaattaaaggcataaaccaccaaaaaaaaaaaaaaaaaaa

SEQ ID NO: 3696 - DNA, 1947 bp, Rattus norvegicus
  Genbank Accession No. NM_031816
gggctagaggcgcgggttgaaaagtctcgttccaagtttggagagagggagagagaggagagcgtctcagacctcgctacccgcaagcggggaggaggcagaagagaagatcgcggcgtctggggagcacccagacagccagaccgagctcaggctttccgagctaggagtgcgtgacgtgcctgggagaggcaggagcgcctgcgatcgggctgctcttgactagcgagagaagtccgaggcggcaaaggggggcgaacgacccgacgcaagatggcgagtaaagagatgtttgaagatactgtggaggagcgtgtcatcaacgaagaatataaaatctggaagaagaatacaccgtttctgtatgacctggttatgacccatgctcttcagtggcccagtcttaccgttcagtggcttcctgaagtgactaaaccagaaggaaaggattatgcccttcattggctagtgctgggtacccatacatctgatgagcagaatcatctggtggttgctcgagttcatattcccaatgatgatgcacagtttgatgcttcccattgtgacagtgacaagggagaatttggtggctttggttctgtaacaggaaaaattgaatgtgaaattaaaattaatcatgaaggagaagtaaatcgcgctcgttatatgccacagaacccacacatcattgccacaaaaacaccatcttctgatgttttggtttttgactatacaaaacaccctgcaaaaccagatccaagtggagagtgtaatcctgatcttagattaagaggtcaccaaaaggaaggctatggtctctcctggaattctaatttgagtggacatctcctgagtgcatctgatgaccatactgtctgcctctgggatataaatgcaggaccaaaggaaggcaaaattgtggatgctaaagcaatctttactggccactcagctgttgtagaggatgtggcctggcatctgctgcatgagtccttgtttggatctgttgctgatgatcagaaacttatgatatgggacaccagatccaatactacttctaagcccagccatttggtggatgcacacactgcggaggtcaactgcctctcattcaatccctacagcgagtttattctggcaactggctctgcagataagactgtagctttatgggacctgcgtaatctgaaactaaaactccacacctttgaatcccataaggatgaaatttttcaggtccactggtctccacataatgaaactattctggcttcaagtggtactgatcgccgcctgaatgtgtgggatttaagtaaaattggagaagaacaatcagcagaagatgcagaggatgggcctccagagctcctgtttattcatggaggacacactgccaagatttctgacttcagttggaaccccaatgaaccttgggtcatttgctctgtgtctgaagataacatcatgcagatatggcaaatggctgaaaatatttacaatgatgaagagtcagatgtcacgacatcggaactggaggggcaaggatcttaaacccaaagtatgagttgtttctattgaatgtattgctacacgaatgcttgatttgtcaagcgccaaaaaggcattgtatagtaggaaatgtaagtgggatggcttctggcattctttaccctctgattctagcactttcaagtgagctgttgcgtactgtatcatattgtagctattaggggaacaaaaaggaatgttgcttaagaatggacatcattgttttaaacacacattgctgggtattgcctttgattcaactgtcattttctcaaacttttaagtgcttgctcaagttcccaaatatgcgaggataacttttacactttttccttccaacacttcttgattggctttgcagaaataaagtttttaaaaaaaaaaaaaaaaaaaaaaaaa

SEQ ID NO: 3697 - DNA, 1536 bp, Rattus norvegicus
  Genbank Accession No. NM_031817
ttgaaactgaagcaatctcaacaggagaagaaatgggctgtttacgtccaatatatgtcctcttcttctgttttgtagttagagtatacggccaatatgaagcttaccagtgggatgaagattatgagcaagagccaagtgaggattatgagccagaattccagtttcaccaaaatatcgaatatggagctcccttttatcagaatattttaggttgtgctaaggaatgcttctgtccaactaactttccaacatcaatgtactgtgacaaccgcaaactcaagactatcccagatattccaatgcacattcagcaactcaaccttcagttcaatgatattgaggctgtgactgcagattcattcatcaatgcaactcatcttaaagaaattaaccttagccacaacaaaattaaatctcaaaagattgattatggtgtgtttgctaaactttcaaatctacagcaacttcatctagatcacaataacttagaagaatttccatttcctcttcctaaatctctggaaagactccttcttggttataatgaaatctctacacttccaacacatgccatggatgggctggtaaatgtcactatgcttgacctctgctataaccatctctctgactccacgttaaaaggaaagattctttccaaactggaaaagctcatgcagcttaacctgtgcaataacaggttagagtcaatgccccctgggttgccgttatcacttatgtatctatctttagaaaataattcaatttcatctataccagaggattactttcagaaacttccaaaacttcatgctctaagaatatcacacaacaaacttgaagacattccatatgacatctttaatctttccaatcttatagaactcaatgttggacataacaaactgaagcaagcattctacattccaaggaatttggaacatctatacctacaaaataatgaaatacaaagcatcaatgtgacaatgatgtgtccttctcttgatccattacaccatcaccatttaacataccttcgtgtggaccaaaataagctgaaggaaccaataagttcatatatcttcttctgcttccctcggatacacagtatttattatggtgagcagaggagcactaatggtgaaacaatacaactgaagacccaagttttcaggcgctatcaagatgaggaagaggaagaggaagacgacagtcaggaccacactcttgagggtcaagaagaaacagaagagcactttaattctcattactatgaaatgcaagcatggcaaaatactatataggtacatatttatgactccataaagccttaataattacaaatgtaagcgtatacctgctcataataatatatctagaagtatgtgctagtataaagacccgaattgcatttgagatgttagtgagaatggttttacttcataggcgtagtgcttactagaaacgatgcaaaccttaagaaatataaagtagaatggcaagtgggaataaacaaaactaagctcaaaaaaaaaa

SEQ ID NO: 3698 - DNA, 14746 bp, Rattus norvegicus
  Genbank Accession No. NM_031819
ttacctgagtcccgccagcactggaggaggatcgcgctctgcttggggatatgctgaagatccaagggaggcaaagttggtacttcgagcccggatcctaacaaatatccaatcggcgtgggaattacccaactgccggggactgtaaggaagaacaccgaggaccgggctactgtggtggccaagagttgaacaatggggagacacttggccttgcttctgcttctgctcttcttcctccagcattttggagatggtgatggaagccaaagacttgaaccgaccccttccctccagtttacacacgtccagtacaatgtcactgtgcacgaaaactcggccgcaaagacctatgtcggccaccctagaaaaatgggcatctacatcttagacccctcgtgggaaataaggtacaaaatcatctcaggagacaacgaaaacctattcaaagcggaagagtatgttctcggagacttttgctttctaaggataagaaccaagggagggaatactgccatcctgaaccgagaagtgagagaccattacacactggtaatcaaagcagttgaaaaagtcacagatgccgaggcccgagccaaggtcagggtgcaagtgctggatacaaacgacttacggccgttgttctcacccacgtcctacagcgtttctctgccggaaaacacagccataaggaccagtatcgcaagagtcagtgccacggatgcggacattggaaccaacggcgaattttactacagctttaaagacagaacggacatgtttgccatccacccaaccagtggtgtggttgttttgactggcaggcttgatgtcctggagacccagcgctatgagctggagatcttggctgtggaccggggaatgaagctgtacggtagcagtggggtcagcagtctggccaagctgacggttcacgtggagcaggctaacgagtgtgcacccgggataaccgccgtgacgttatcaccatctgagctggacaaggacccaacgtacgccattatcactgtggaggactgcgatcagggtgccaacggggagatagcatctttgagcattgtggctggcgacctccttcagcagtttaaaacggtgaggtctttcccagggagtaaagcattcaaagtgaaagccgtcgggggcgtcgactgggacagccatccttatggctacaacctgacagtgcaggctaaagacaaaggaactcctccgcagttttcccctgtgaaagtcattcacgtcatttctcctcagttcagagctggcccggtcaagtttgaaatggatgtttacagagctgagatcagtgagtttgcccctccacatacacccgtggtcctggtcaaggctattcctagttattcccatttgaggtacgtttttaaaagcactcctggaaaacccaaattcggtttaaatcacaacacgggtctcatttccattttagaaccaattaaaaggcagcacacatcccattttgagcttgaggtgacaacaagtgacagacgagcctccaccaaagtcgtggtcaaagttgtaggtacaaacagcaaccccccggagtttacacagacctcgtacaaagcatcctttgatgagaatgcacccgtcggtaccccggtcatgagggtgagcgcggttgaccctgacgagggggagaatggctacgtgacttacagtattgcaaacttaaatcacgtgccatttgtcatcgaccactttacgggtgctgtgagtacctctgagaatctggactatgaactgatgcctcgagtctacacgctgaggattcgtgcttccgactggggcttaccgtaccgccgggaagttgaagtccttgccacaattactctgaataacctgaatgacaacacccccctgtttgagaagacaaactgtgaagggacaattccccgagacctgggtgtaggggagcagataaccacggtttctgccattgacgctgatgagctgcagttggtccggtaccagattgaagctggaaatgagttggatttgtttggcttaaaccccagctctggtgtgctgtcattgaagcactcgctcatggacggcttgggtgcaaaggtttcctttcacagcttgagaatcacagctacagacggagaaaattttgccacaccattatatatcaacctaacggtggctgccagtcgcaagccagtaaacttgcggtgtgaggagaccggtgttgccaaaatgctggcagagaaactcctgcaggcgaataaattacaccatcagggggacgcggaggatattttctttgattctcactccgtcaacgcccatgccccacagtttaggggttctcttccaacaggaattgaggtaaaggaggacctcccagtgggcgccagtatactattcatgaatgctactgaccttgactctggcttcaatgggaaactggtctatgctatctctggagggaatgatgacagttgctttactgttgacatggaaacaggaatgctgaaagtcctctctccacttgaccgagaagtaacggacaaatacacactgaacattaccgtgtatgaccttggtataccccagagggctgcctggcgccttctggatgtcaccgtcctggatgccaatgacaacgcgcccgagtttttacaggagagctattttgtcgaagtgagcgaagacaaggagataaacagtgaaatcatccaggtagaggccaccgataaagacctgggccccagcggacacgtgacatacgccatcctcacggacacagagaagtttgcgatcgacagggtgaccggtgtggtgaaaattatccagcctttggatcgtgaagtgcagcgtgtacattacctgaagatcgaggccagggaccaagccacagaggaaccctggctgtcctccactgtgcttctgaaagtgtcactcgatgatgttaatgacaacccacctaggttcattccacccagttactccgtgaaggttcgagaagacctaccggaaggaaccatcatcatgtggttagaagcccatgaccctgatgtaggtcagtccagtcaggtgagatacagcctcctggaccacggagaaggccacttcgatgtggataaactcagcggggcagtgagaattgtccagcagctggactttgagaagaagcaactgtataatctcaccgtgagggccaaagacaaagggaagccggcgtctctgtcttccactggctacgtggaagtggaggtcgtggacgtgaatgagaacttacacgcgccagtgttctccagcttcgtggagaagggcacagtgaaagaagacgtccctatgggctcatcagtaatgaccgtgtcagctcacgatgaggacaccgggagagatggagagatccggtattccatcagagatggctctggtgttggtgttttcaggatagatgaagaaacaggtgtcatagagacctcagatcgactggaccgagagtcgacttcccactactggctcaccgtctacgccacagatcagggtgtggtgcctctgtcatccttcatagaggtctacatagaggttgaggatgtcaatgacaacgcaccacagacatcagagcctgtgtattatcctgaaataatggagaattcacccaaggatgtatctgtggtccagattgaggcatttgacccggattccagctccagtgacaagctgacgtacagaattacaagtggaaatccccaagggttcttctcaatacaccctaaaacaggtctcatcacaaccacatcgaggaagctggaccgagagcagcaggatgaacacattctggaagttactgtgacagacaatggtgtacctcccagatccaccattgccagggtcattgtgaaaatcctggatgagaacgacaacaggcctcagttccttcagaagttttataaaatcaggctcccggagcgagaaaaagctgatggagaccggagcgcgaagcgcgagcctctctaccgagtcatagccgcagataaggatgaagggcccaatgccgagctctcctacagcatcgaggaagggaacgagcacggccggttttccattgaacccaagacaggagtggtctcatccaaaaagttctctgcggctggagaatacgacattctttctattaaggcaattgacaatgggcgcccccagaagtcatcgaccaccagactccatattgaatggatctccaaacccaagccgtccttggagccgatttcgtttgaggaatcggttttctcgtttactgtaatggagagtgatccggtggctcacatgatcggcgtgatctccgttgagcctcctggcatgcctctgtggtttgacatcatcgggggcaactatgacagtcactttgatgtggacaagggcactggaaccatcattgtggccaagccccttgacgcagagcagaagtccagctataacctcacagtggaggcgacagacgggacctccactatcctcacccaggtactcatcaaagtaatagataccaatgaccaccgccctcagttttctacctcgaaatacgaagtctctgttcccgaagacacagagccagaaacagagattctgcaaatcagcgccgtagacagggacgagaaaaacaaactgatctacaccctccagagcagcatagatccagcaagtctcaagaaattccgcctcgatcctgcaacaggcgctctctacacatctgagaagctcgatcacgaagccattcaccagcacgtcctcacagtcatggtccgggatcaggatgtccctgtgaaacgcaactttgccagaatcattgtgaatgtcagtgacatgaatgaccactctccgtggttcaccagttcgtcctatgaagggcgggtttatgagtcggcagccgtgggctcggtcgtgctacaggttacagctctggacagagacaaagggagaaatgctgaagtgctctactccatcgagtcaggaaacattggaaattcctttacaatcgaccccatcttgggctctataaaaactgccagagaattggatcgaagtcaccaagtagactatgatttaatggtaaaagctacagacaaaggggagccaccaatgagcgaaatgacctccgtgcggatctctgtcaccgtcgccgacaatgcctctcctaagttcacatccaaggagtactcggctgagattagtgaagccatcaggattgggagttttgttggaatggtctctgctcacagtcagtcatcagtgatgtatgaagtaaaagatggaaatataggcgatgcatttaatatcaatccacattcaggaagcatcgtcactcagagagccttggattttgagacactgcccatttatacattgacagtacaagggaccaacatggccggcttgtccaccaatacaacggtggtagtgcacatacaggatgagaatgacaaccctccagctttcacacgggcggaatattcaggattcattagtgaatcagcctcagtcaacagcgtggtgctaacggataagaatgttccgctcgtgatccgagccaccgacgctgatcgggaatccaatgctctgctcgtctatcaaattgtcgagccatctgtgcacaactattttgccattgatcccaccaccggtgccatccataccgtactgagtctggactatgaagagacacgtgtctttcacttcaccgtccaagtgcatgacatggggacgcctcgtctgtttgctgagtatgcagcaaatgtgaccgtgcatgtgattgacatcaatgactgcccccctgtcttctctaagtcactgtacgaagcatccctcctattgccgacgtacaaaggcgtgaacgtcatcacagtgaatgccacagatgccgactccagggcgttctcccagttaatatactccatcaccaaaggcaacattggggagaagttctccatggaccacaagactggcaccatagcaattcagaacacaacccagttacggagccgctatgagctgaccgtccgcgcctccgatggccggtttacaagcgtggcctccgtgagaatcaacgtgaaggaaagcagagagagtcctctcaagtttacccaagatgcctactctgcggtggtgaaggagaactccaccgaagccaaaaccttagctgtcattaccgcgatagggaacccgattaacgagcctttgttttaccgtatcctcaacccagaccgcagatttaaaatcagccacacctcaggcgtgttgtcaaccactgggataccatttgatcgggagcaacaggagacgtttgttgtggtggtagaggtgactaaagaacgggagccgtcggccgtggcccacgttgtggtgaaggtcaccgtggaagaccagaatgataatgcacccgtgtttgtcaaccttccctactatgctgtggtgaaggtggatgctgaggtgggccatgtcatccgccacgtcactgccattgacagagacagtggcagaaacggtgacgttcactactaccttaaggagcatcatgaccactttgagattggaccctctggtgacatttctctgaaaaagcaatttgagcacgacaccttgaataaagaataccttgtcacagtggttgcgaaggacggggggaacccagctttctccgcagaagttctagttcccatcaccgtcatgaacaaagccatgcccgtgtttgaaaaggctttctacagtgcagagattcccgagaacgtccagacgcacagcccagtggtccacgtccaagccaacagcccagaagggttgaaagtgttctacagtatcacagacggggacccttttagtcagtttactatcaacttcaacactggggtgataaacgtcatcgcaccgctggactttgagtcccacccagcctataagctaagcatacgggccactgactccctgactggcgcccacgctgaagtgtttgttgacatcgtagtagaagacatcaatgacaaccctcccgtgtttgtgcaacagtcttactcgacaaccctgtctgaagcatctgtcatcggagcgcctatccttcaagttagagccaccgactctgactcggaaccaaatagagggatttcctaccagctgattggaaatcacagcaaaagccacgatcactttcacatagatagtcacactgggctgatttcactggtgagggctttggattacgaacagttccagcagcacaagctgctcgtaagggctgttgatggaggaatgccgccactgagcagcgatgtggtcgtcactgtggatgtcaccgacctcaacgataacccgcctctgtttgaacaacaggtttacgaagctaggatcagtgagcacgctgcccacgggcattttgtgatgtgcgtaaaggcctgtgatgcagatcgctcagacctagacaggctggagtactccattctgtccggcaatgatcacaagagctttgtcattgacggggagacaggaatcatcacgctctccaacccgcgccgccacaccttgaagccgttctatagtctcaacgtttctgtgtctgatggggttttccgaagctcggctcgggtgaatgtcaccgtgatgggagggaatttgcacagccctgtctttcaccagaatgagtatgaggtagagctggctgaaaacgcccccttgcacaccctggtggtccaagtgaaggctactgacagagattccggtatctacggccacctgacttaccaccttgtaaatgactttgccaaagacaggttttacgtgaacgacggagggcaggtcttcactctggagagacttgatcgagaggctccagcagagaaagtgatctcagtccgtttaatggctaaggatgctggggggaaggtcgccttctgcactgtcaacgtcatcctcacggacgacaatgacaacgcaccacagtttcgctcaaccaagtacgaggtgaacgtggggtccagcgccgccaaagggacgtcggtcgtcaaggtcttcgcgagtgatgccgatgaggggtcgaatgctgacgtcacctacgccatcgaggcagattcggaaagtgtcgaggagaacttggaaatcaaccaactgaccggcctcattactacaaaggaaagcttaataggtttagagaatgaattcttcactttcttcgttagagctgtggataacgggtctccgcccaaagagtctgttgttcctgtctatgttaaaatacttcccccggaagtgcagcttcctaggttctcagagcccttttatacctattccatttcagaagacatgcctattggcacagagattgacctcatccgggtagagcatagcgggactgttctctacaccctggtcaaaggcaatactcccgagagtaacagggacgagttctttgtgattgaccggcagagtgggagactgaagctggagaagagccttgaccacgagaccactaagtggtatcagttttccatcctggccaggtgtactctggatgactacgaggtggtggcttctatagatgtcagtatccaggtgaaagacgctaatgataacagcccagttttggagtccaatccatacgaggcatttattgtcgaaaacctgccagcagggagtagggtcatccaggtcagagcatctgacctagactcaggagtcaacggccaagtcatgtacagtctagatcagtcccaagatgcagacatcatcgagtcttttgccattaacatggaaacaggctggattacaaccctcaaggagcttgaccatgaagagagagccagttaccagattaaagtggttgcctcagaccatggtgaaaaggtgcagctgtcttccaccgccattgtggatgtcaccgtcactgacgtcaacgacagcccgcctcgattcacagctgagatttataaagggacagtgagtgaggatgaccccccagggggtgtgatcgccatcttgagcaccactgacgccgactctgaagagattaaccgacaagtgtcgtacttcataacaggaggggatgcattgggacagtttgctgtggaaaatatgcagaatgactggagggtgtacgtgaagaaacctctcgacagggaacaaaaggacagttaccttctgaccgtcactgcaacagatgggaccttctcttccaaagctagagttgaagtcaaggttctcgatgccaatgataacagtccagtgtgtgagaggaccgcatattctgatgccattcccgaagacgctcttccggggaagctggtcatgcaggtctctgccacagatgcagatatccggtccaacgcggagatcacttacactttatttggctcaggtgcagaaaagtttaaactgaatccagacacaggtgaactgagaacattagccctccttgatcgtgaggagcaagcagtttatcatcttctggtcaaggccacagacggagggggcagatcctgtcaggcaactattgtgctcacgttagaagatgtaaatgacaacacccccgagttcaccgcggatccatacgccatcacggtatttgaaaacacagagcctgggacaccgttgaccagagtgcaggccaccgatgcagacgcagggttgaatcggaagatttcctactcactgcttgactctgctgacgggcagttctccattaacgagcagtccggaattcttcagttggaaaagcatttggacagggaactacaggcagtctatactctcactttgaaagcagcggaccaaggattgccaaggaaattgacagccactggcacggtggttgtgtctgttttggatataaatgacaacccacctgtgtttgagtaccgtgaatatggtgccaccgtgtcagaggacattgtcatcgggaccgaagttctccaggtgtacgcagccagtcgggatatcgaggcgaatgcagaaatcacatacgcaatcataagtgggaacgaacacggaaaattcagcatcgattctaagacaggggccatatttatcattgagaacctggattatgaaagctcccatggctattacctgactgtggaagccactgatggaggcacgccctcgttgagtgacgtggcgaccgtgaacatcaacatcacagatattaacgataacagcccagtgttcagccaggacagctacaccacagtggtcagcgaagacgcggccctggagcagcccgtcattacaattatggctgatgatgctgatggcccttcaaacagccacatcctctactccattatagagggtaaccaaggaagtccattcacaatcgaccctgtcagaggagaaatcaaagtaacgaagcccctagaccgcgaaacgatctcaggttatacgctcacggtgcaggctgccgacaacggcaatccacccagagtcaacaccaccacagtgaacatcgatgtctccgatgtcaacgacaatgctcccctcttctccagagacaactacagtgtcatcatccaggaaaacaagcccgtgggtttcagcgtcctgaagctagtagtgacagacaaggactcgtcccacaacggcccccctttctcctttgctattgtgagtggaaatgatgacaacatgtttgaggtgaaccagcacggggtcctcctgacagcggcaacagtcaagaggaaagtgaaggaccattaccttctgcacgttaaggtggctgacaatggaaagcctcagctgtcttcgttgacacacattgacatcagggttattgaggagagcatccaccctcctgccattttgccactggagattttcatcactgcttctggagaggaatactcaggcggggtcataggaaagatccatgccacagaccaggatgtgtatgacaccttgacgtacagtctggatccccacatggatggcctgttctctgtttccagcacggggggtaaactgattgcacacagaaagctggatataggccagtaccttcttaatgtcagcgtgacagacgggaagtttacaacggtggctgacatcaccgtgcacatccagcaagtgacccaggagatgctgaaccacaccatcgctatccgatttgcaaatctcaccccggaagagtttgtcggcgactactggcgcaacttccagcgagctttacgcaacatcctgggcatccggaagaacgacatacagattgtcagcttgcagccctccgaaccccactcccaccttgacgtcttactctttgtagagaaatcagggggcacccagatctcaacgaaacaacttctgcacaagatcaattcttccgtcacggacatcgaggaaatcattggcgtgaggatactggatgtgttccagaaactctgtgcagggctggattgcccgtggaaattctgtgatgagaaggtttctgtggatgaaaacattatgtcaactcatagcacagccagactgagttttgtgactccccggcaccatagaacagccgtgtgtctctgcaaagatgggacatgcccgcctgtccaccaagggtgcgaagataacccctgtcctgcaggatccgaatgtgtcgctgatccccgagaagagaagtacagctgtgtgtgtcctggtggcgggttcgccaaatgtccagggagttcatccataacttttaccggcagcagctttgtgaaatatcgtctgatggaaaatgaaaaccgactggagatgaagttgaccatgcgcctgagaacctactcttcccacgcggttgtgatgtacgctcgaggaactgactacagtatcctggagattcatactgggagactgcagtacaaatttgactgtggaagtggccctgggatcgtctctgttcagagcattcaagtcaacgatgggcagtggcatgcagtgtccctggaagtggaggggaattatgcaaaattggttctagatgaagtccacactgcctcgggcacagccccaggagctctgaaaaccctcaacctggataactacgtaatttttggtggccacctccgccagcaagggacaaaacatggacgaaacacccaggtggccaatggtttcaggggctgcatggactctatttatttgaatgggcaggagctacctttgaacaacaaaccaagagcctatgcacacatcgaagaatgggtggacctagctcatgggtgcttgttaactgccaccgaagactgttccagcaacccttgtcagaatggaggcgtctgcaatccctcgcccactggaggttattactgcaagtgcagtgcattgcacgcagggacgtactgtgaggtgagcgtcaacccgtgctcctccaacccctgcctctacggaggaacgtgcatggtagacaacggaggttttgtttgccagtgcagggggctgtacactggccagagatgtcagcttagtccgtactgcaaagatgaaccctgtaaaaatggtggaacgtgttttgacagtttggatggtgctgtctgtcagtgtgactcaggctttaggggagaaagatgtcagagtgacattgacgagtgtgctgggaacccctgtcggaacggggccctttgcgagaacacgcatggctcctatcactgtaactgcagccaggagtacagagggaagcactgtgaggatgccactcccaaccactacgtgtccaccccgtggaacatcggactggccgaaggaatcggaattattgtgtttatagccgggatattcttactggtggtggtgtttgtcctctgccgaaagatgatcagtcggaagaagaaacaccaggcggaacctgaagacaagcgtttggggccaaccacggctttcttacagagaccttactttgattccaagccgagcaagaacatttactctgacatcccgccccaggtgcccgtgcgtcccatttcctacactccgagcattcccagtgactctagaaacaatctggaccggaactcgtttgaaggctcggcaatcccagagcacccagaattcagcacttttaaccccgagtctatgcacggacatcggaaagccgtggctgtgtgcagcgtggctccaaacttgcctcccccacccccttccaactctccctcagacagcgactccattcagaagcccagctgggacttcgactacgacgctaaagtggtggatcttgacccttgtctttccaagaagcccctggaggaaaaaccctctcagccatacagtgcccgggagagcctgtccgaggtgcagtcccttagctccttccagtcagagtcctgtgatgacaatgggtaccactgggatacatcagactggatgcccagtgttcctctgccagacatacaagagttccccaattacgaggttatcgatgagcacacgcccctctactcagctgatccaaatgccatcgacactgactattaccctgggggttatgacattgaaagtgactttccacccccaccagaggacttccctgcacccgatgaactgccaccattgcctccagaattcagcgaccagttcgagtccatacacccacccagagacatgcccgcagcaggtagcttggggtcttcctccaggaatcgtcagaggttcaacctgaatcagtacctgcccaatttctaccccgtcgatatgtctgaacctcagaaacaaggcgctggtgagaacagtacctgtagagaaccctacactccctaccctccagggtatcaaagaaacttcgaggcgcccaccatagaaaacatgcccatgtctgtgtacacctctacggcttcctgctccgatgtgtcagcgtgctgcgaagtggagtctgaggtcatgatgagtgactacgagagcggggacgacggccactttgaagaggtgaccattcccccgctagattcccagcagcatacggaagtgtgacgctcaagctcctccccaaagtgcctggactctcatgaacctagagatgctatctgatatccacgttgttcttctgcggcggtcttgcctgcttctcgatgagctgcggtaggcacggttgcacggagtcacatgcctctcgacgtgttagccatttccagtgtcctaactgactgtgattgaccgggttttcatcccctgtccatcctgagcatctttgcgtatttagatttgtctctgttaaaaaatgatgaaacagaaatcggtcctgtcgtcttgttagcatgattcatgtatttatatagattcgattattttaattttgttttctttgtgtaaattttatgtacagatttgattttcccccccatagttttttactaggtttttcaggacgcatcgcgtgtttgttttctgctggatctgtgtggtgttagcgtcgtcgcctagcaccgattttctgatgtaaacagggtttcataccgttctttcccactgaagtatgacatttcattgacacatttcggtccagtgtagctgtacatatggggtgaggacaacctgttactggacatgtcttaaatgggttgctgtattcggattataaacatttttcattattggaaagtgtaaaggggaccttctgcatacctgtttagaacccaaaccaccacgacacggtttttatagtgtctgtatatttgtgatgcaatggtctcgtaaaggtttttactgaaaactatcattagccagcctttcttactgacaataaattattaat

SEQ ID NO: 3699 - DNA, 2629 bp, Rattus norvegicus
  Genbank Accession No. NM_031830
tggggcgcggccggtgctgcggacccgccacagccctccaggtcgctgcggacccaaggcctgcttgcctgccagcggcaccatgggcaattgccacacggtgggccccaacgaggcactggtggtctcagggggctgttgtggttctgactacaagcagtatgtgtttggcggctgggcttgggcctggtggtgtatctcggacactcagagactgtctctggaggttatgaccatcctgtgtcgctgtgagaatattgagacgtcggagggggtcccgctattcgtaacaggggttgcacaggtgaagatcatgacggagaaggagctcctggctgtagcctgtgaacagttcctgggcaagaacgtgcaggacattaagaacgtcgtactgcagaccctggaggggcatctacgctccatccttgggactctgactgtggagcagatttatcaggaccgagaccagtttgccaagctggtgcgggaagtggcagcccctgatgttggccgtatgggcatcgagatcctcagcttcaccatcaaggatgtctatgacaaagtagactatctgagctccctgggcaagacacagactgccgtggtacagagagatgcagacatcggtgtggcagaggcagagcgggacgcaggcatccgggaagccgagtgcaagaaggaaatgctagatgtgaagttcatggcagacaccaagattgctgactccaagagagcctttgagctgcaaaagtcagccttcagtgaggaggtcaacatcaagacagctgaggcccagttggcctatgagctacaaggggccagagagcaacagaagatccggcaggaagagattgagattgaggtagtacagcgcaagaagcagatcgccgtggaggcgcaggagatcctgcgcacagacaaggagctcatcgccacagtgcgccgccctgcagaggcagaggcccaccgcatccagcagattgctgaaggcgaaaaggtgaaacaagtcctcttggcacaagcagaagctgagaagattcgcaaaatcggggaggcagaggcagcagtcattgaggccatgggcaaggccgaggccgagcggatgaagcttaaagctgaggcctaccagaagtacggggatgcggccaagatggccctggtgctggaggccctgccccagattgctgccaagatctccgcacccctgactaaagtcgatgagattgtggttctcagtggggacaacagcaaggtgacatcagaagtgaaccggctgctagcagaactgcctgcttctgttcatgccctcactggtgtggacctctcaaagataccactgatcaagaatgccactggtgcgcaggtgtgaggctcctggcactcggcctccagcagctgcctgcccttctagcgcctgttttcaagtcatggggacagcgagaacattactgactctggtgccttatttcgtagggaccagaagtgctgcgagttcaggccatctctggctatcttcccttctctcctgtctgccttctcttttttttccacaccttcacgttaactgccacatccatctagcctgtctcctcatctgccatatgtgcctcttcctctggctctgtttttctcccttctcccaacttcacacacatcatctactttaactgaagttgaacttgtttatgataatcactgtctgtctgtctgtctgtctgtctgtctgtctgtctgtctgtgaggagtggccccgctgcttctcaaaattctggtgccttcaagttctacatgtatctgtctgtcctcgctggccctggcagagcccagcatgggtacaagggttctgcgtaggacacccactctcctctctcctggtctgaatctccaagcgctaaatgctgttccaggaagcccacatctcacacagtcttgccctttgaggcctaagtggccatggcctattggccgtagcataatgcccttcccacaccgaggcccgggcctgctgtcatacctgcccctgtcccctgcaccatagaggcacagaagcacggcctcctgtctgtagcagcttcctcagtgtactactgccttaggaggccctgcttgtgctcagggacatcccttccgttggcttgtccttgattggtgggtgggtcttaatctgatcccactaagtctttctgggtcactatctagctctgttgggacaggtaaagtttataggccttcttcctgctagtgaatggggctctcccagggggcaaggctgtgccaaccgtaagagaatcaagtgctgaagactggccaaacttcactccctctatgccattttcttcttggtcagcataatgggtttctagccatgggaagcagctaagtgttctgtgtctttgcacctgcaccactggtggcagaagaacccagtgcccaggtgtcctagtaagggtgcaagggtgtctgtcccatgggcccagtccccagccctggcctgccccggcctgtgtagctgtgctgcatgtgaatgctgcatgtctggtctggggtttggatattgcactgccccactgcctgtcccccgctggtgacaataaagatctcttatagccacaaaaaaaaaaaaaaaaaa

SEQ ID NO: 3700 - DNA, 948 bp, Rattus norvegicus
  Genbank Accession No. NM_031832
aacagctagcggagcggcaggaggagcactaaccaggaaaatggcagacggcttctcacttaatgatgccttagctggctctggaaacccaaaccctcgaggatggcctggtgcatgggggaaccagcctggggcaggaggctacccaggggcctcctatcctggggcctacccaggacaggctcctccagggggttatcctggacaggctcctcctagtgcctatccgggcccaactggccctagtgcttatcctggcccaactgcccctggagcttatcctggcccaactgcccccggagccttcccagggcaacctgggggacctggagcctaccccagtgctcctggggcctaccccagtgctcctggggcctatcctgctactggcccctttggtgccccgactggaccactgacagtgccctacgatatgcccttgcctggaggagtcatgcctcgcatgctgatcacaatcataggcacagtgaagcccaacgcaaacagtatcactctgaatttcaagaaagggaacgacatcgccttccactttaacccccgcttcaatgagaacaacagaagagtcatcgtgtgcaacacgaagcaggacaataactggggaagggaagaaagacagtcagctttcccctttgagagcggcaaaccattcaaaatacaggtcctggttgaagccgaccacttcaaggttgcggtcaatgatgttcatctgttgcagtataaccatcggatgaagaacctcagggaaatcagccaactggggatcattggtgacataaccctcaccagcgcttcccacgccatgatctaagccagaaggggtgggccggcaccagaactgccctgtgtgttatgagcgggaaactttgcatttctctctccttatacttcttgtaagacatccatttaataaagtctcgtgctgagaga

SEQ ID NO: 3701 - DNA, 631 bp, Rattus norvegicus
  Genbank Accession No. NM_031833
cggttctcgtctctgctctcttcgctctccgctggcaccagccgacccaccagctttcggacatggccaacctcgagcgtaccttcattgccatcaagccagatggcgtgcagcgcggcctggtgggcgagatcatcaagcgattcgagcagaaggggttccgcctggtggccatgaagttccttcgggcttctgaggaacacctgaagcagcactatatagacctgaaagaccgtcctttcttcccggggctggtgaagtacatgaactcagggcctgtggtggccatggtctgggaggggctcaatgtggtgaaaacaggccgatggatgctgggggagaccaatccagctgattcgaagccaggcaccattcgtggggatttctgcattcaagttggcaggaacatcattcacggcagtgattcagtggagagtgccgagaaagagatcggtctatggtttaagcccgaagaactgattgactataagtcttgtgcccatgactgggtgtatgagtagacgcggagaaaccagagtccttttcagcactactgatggggttcctggacacagctcttcatcccactgactggatggaccatcttttctaaaacaataaagactttgcg

SEQ ID NO: 3702 - DNA, 1227 bp, Rattus norvegicus
  Genbank Accession No. NM_031834
ggaattcgcaacgcctacacaaagatccctatcactgagcacccggaggcaaggctcagaaccccaggatcagcaacatggagttctcccgtccaccgctagtgcatgtgaagggtatcccactcatcaaatactttgcagagacaattgggccattgcagaacttcacagcctggcctgatgacttgctgatcagcacatacccaaagtctggtactacctggatgagtgagatcctggatatgatctatcagggtggcaagctagagaagtgtggccgcgcccccatctatgcccgggtacccttccttgagttcaaatgtccaggggttccctcaggtcttgaaactttggaagagacaccagccccacggctccttaagacacatctgcccctgtccttgctccctcagagtctgctggatcagaaggtcaaggtgatctacattgcccgaaatgcaaaggatgtggttgtctcctattataacttctacaacatggccaagctgcaccctgatccaggcacctgggacagcttcttggagaacttcatggatggggaagtgtcctatgggtcgtggtaccagcacgtgaaggagtggtgggagctgagacacactcaccctgttctctatctcttctatgaagacataaaggagaaccccaaaagggagatcaagaagattctagagtttttggggcgctctctacccgaggagactgtggattccattgttcaccacacatctttcaagaaaatgaaagagaactgcatgactaactacacaaccatccccactgagattatggaccacaatgtttctcccttcatgaggaaaggtactactggggactggaaaaataccttcactgtagcccagaatgagcgctttgatgcccactatgctaagacaatgacagattgtgacttcaagtttcgttgtgaactatgagtggattatggctatactgggaaccaaggcaaactgacacagcccatcatgatctcaagtaaaatgtgatgtgttcaatctacttgttgtatgcctagaggaaatctgagctaagagaataggattggggatgtggctgaggcagagggttttatcaacgcatgtcaggaaagcaatcagtcccaacacctaaaaagaacctaaagtacaaacatgcaaaaaatagtaagataaactatattttacctgaaagaataaatgccactgggaaatg

SEQ ID NO: 3703 - DNA, 645 bp, Rattus norvegicus
  Genbank Accession No. NM_031836
atgaactttctgctctcttgggtgcactggaccctggctttactgctgtacctccaccatgccaagtggtcccaggctgcacccacgacagaaggggagcagaaagcccatgaagtggtgaagttcatggacgtctaccagcgcagctattgccgtccaattgagaccctggtggacatcttccaggagtaccccgatgagatagagtatatcttcaagccgtcctgtgtgcccctaatgcggtgtgcgggctgctgcaatgatgaagccctggagtgcgtgcccacgtcggagagcaacgtcactatgcagatcatgcggatcaaacctcaccaaagccagcacataggagagatgagcttcctgcagcatagcagatgtgaatgcagaccaaagaaagatagaacaaagccagaaaaaaaatcagttcgaggaaagggaaagggtcaaaaacgaaagcgcaagaaatcccggtttaaatcctggagcgttcactgtgagccttgttcagagcggagaaagcatttgtttgtccaagatccgcagacgtgtaaatgttcctgcaaaaacacagactcgcgttgcaaggcgaggcagcttgagttaaacgaacgtacttgcagatgtgacaagccaaggcggtga

SEQ ID NO: 3704 - DNA, 3061 bp, Rattus norvegicus
  Genbank Accession No. NM_031837
gtcaggctcgaggtagagacccctgcctccaaggctcccgaggctctgccatgcctgtcaccgatgcagcccccaagagggtagagatccaggtgcccaagccagcggaggcacccaactgcccgctcccaccccagaccctggagaactccgaggccccgatgtctcagctgcagagcaggctggagcccaggccccctgtgactgaggtcccatatcggaaccaggaagactccgaggtggctcccagctgtgttggcgacatggctgacaaccctagagatgccatgctcaagcaagcgcccgtgtcgaggaatgagaaggcccccgtggactttggctatgtggggatcgactccatcctggagcagatgcgcaggaaggctatgaaacagggcttcgagttcaacatcatggtggttgggcagagtggcctcgggaagtccaccttaatcaacaccctcttcaagtccaaaatcagccggaagtcggtgcaacccatctcggaggagcgtatccccaagacgattgaaatcaagtccatcactcacgatattgaagagaagggggtccgaatgaagttgacagtgattgacactccaggcttcggggaccacatcaacaatgagaactgctggcagcctatcatgaagtttatcaatgaccagtatgagaagtacctccaggaggaagtcaatatcaaccggaagaaacgcatccctgacacccgcgtccactgctgcctctacttcatcccagccaccggccactcactcaggcccctggacattgagttcatgaagcgcctaagcaaggtggtgaacatagtccccgtcattgccaaggctgacacgctgaccctggaggagagggtctacttcaaacagcggatcacctcagacctgctgtccaacggtattgacgtgtacccccagaaggagtttgatgaggacgcagaggaccgactggtgaacgagaagtttcgggagatgatcccatttgccgtggtgggcagcgaccatgagtatcaagtcaatggcaagaggattctgggaaggaagaccaagtggggcaccattgaagttgagaataccactcactgtgaatttgcctacctgcgggatctccttatcaggacgcacatgcagaacatcaaagacatcaccagcaacatccactttgaagcctaccgtgtgaaacgcctcaacgagggcaacagtgccatggccaacgggatcgagaaggagccggaaacccaggagatgtagatgcgtcccgcccctggaccccacccccagatcttttcatcatccctggcccacccacctaccctgtcttattttatataattatctccatttgtcacctgcctccatctctttccacactttgccaggtaacaagagagggtttacctcccaagtgtgttcttattggctgcagcatcagggtgggcggggctacagcctgggcttgcccctgtgctctacttcctccccaagttgtgaaggctcgacctggctcagcccctgaggagttagaagagctatgtgtccgtgcccgctctgagttcttagctgaatcctgtgggggccaggtcctaggacgtgcagagaacccattaagccacaagaccccatggccagcctcaagcaggttagaggctgtaccagagaggatggggcttggccaagtagtcctggttccccacgtacccctccaggaggcattgctcacagcaccctcagctgcctgcccctcaaggaactagagacgtcacagccaaagttgccaatcacttagacaaagtgacaaccatgtccctcgaacttgtcccagagcagaaagtgccttgacccataagaactagtcgcctcttcccaaatgtcccaaaggtgaaaagcagggacgtgctggagagggggaaatgtcttttctccctcacccttcgattctctctcccctgtgctgtagatagcgctactacactgggctttaattaaaagagacggagcatgaaaaaggcatcccagccccgctcccaatattaggaaggtcaaagcaagaagatttgtggaagccatgagggaggaaacctcctgagggaggaaagctgtggaaggaaagcacaagggtgcatgggagctctcctgcccaggtgcctcgtttctgtctggtcctcagtttggcccaagatgctctggttacattggcgctccgttgccccaccctacacaccccaccctaagccttgatccagtgactgtactgggtgggagccagaaacctgaccattttgttatctacacgagcctagacccctgtgccccaaacccatcaagaataccttgcaaagagggagagatgaagggggtcagagagggatagtcgggcttacttatctttttttaaagggaaccattagggaccagccatgcacagctgaccaaagccatgtccttcctgcctgcctaccatgcttgattgcctctggggaggagtttggtgaggttagttaggtcggatttgcttggggaaggtgcctctacagaccccgggctagctctctgcagcctagaagtgtagtgggaggggtaggtgtgcagacagatgtgaggagagcattgttccctgcgttgggcgcctactcaccacccaagcgtggaaggcccctccctcgtcacgctctacggccgaacagcttcgcttgctagcttgccaagttcttttgccaaaatcaggactttgaaggaaatctccagcacgtcggacccagggcaccccggtcttctctgatcccagtgtccctggggatttatcagtgaccggtgtcatcaggatgactttgtgcctctgtaaccaggtattgaaactgttcgtctcaccaggccattccacgtggccctttgctgggggcttcctggtgggggtggaaaagtctctttttttgtataaataacaaagtgttgaaatgtatttcctgaaataaatgtttcaaatccaaaaaaaaaaaaaaaaaaaaaaaaaaaaaaaaaaaaaaaaaaaaaaaaaaaaaaaaaaa

SEQ ID NO: 3705 - DNA, 817 bp, Rattus norvegicus
  Genbank Accession No. NM_031838
aacaccaaatggcggatgacgccggtgcagcgggagggcccggaggacccgggggcccaggattaggaggccgcggggctcgtggaggtaaagctgaagacaaggagtggatccccgtcaccaagctgggccgcctggttaaggacatgaagatcaagtccttggaggagatctacctgttctccctgcccattaaggagtctgaggttattgactttttcctgggtgcatctctaaaggatgaagttctgaaaatcatgccagtgcagaagcagactcgggctggccagcggaccaggttcaaggcctttgtcgctattggggactacaatggccacgttggtcttggtgttaagtgctccaaggaggtagccactgccatccgaggggccatcatcctggccaagctttcgaccgtcccagtgtggagaggctactgggggaacaagattggcaagccccacactgtgccatgcaaggtgacaggccgctgtggctctgtgctggttcgtctcatccctgcccccagaggcactggcattgtctctgctcctgtgcccaagaagctactgatgatggctggtatagatgactgctacacttcagccaggggctgcactgccaccctgggcaactttgccaaggccacctttgatgccatctccaagacctacagctacctgacccctgacctctggaaagagactgtgttcaccaagtctccttatcaggaattcactgaccatcttgtgaaaacccacaccagagtctctgttcagaggacccaggctccagctgtggctaccacataagggtt

SEQ ID NO: 3706 - DNA, 2153 bp, Rattus norvegicus
  Genbank Accession No. NM_031839
gagggctaaaatggagctgctgggattcactacgcttgctcttgtggtttcggtgacttgcctcagcctcctttcagtgtggacaaaactgcgcactagggggaggctgcccccggggccccaccccccttcccattattgggaatctactgcaactgaacctcaaggacatcctgcatcgctttccaagctggccaaagagtacgggcctgtttacacgctgtactttggaacctctcctactgtggtcctgcatggctatgatgtggtgaaggaggcgcttctccagcaaggggatgagttcctcgggagaggacctctgcccatcatcgaagatacccataagggatatggactcattttcagtaatggagagaggtggaaagtcatgcgacgcttctccctcatgactctgaggaacttcggaatggggaagagaagcctagaggagagggtgcaggaggaagcctggtgccttgtggaggaattacaaaaaacaaaagctcagccctttgaccccaccttcatcctggcctgtgctccctgcaacgtgatctgctccattcttttcaacgatcgattccagtacaacgacaagacgttcctcaaccttatggatcttttaaataaaaattttcaacaagtgaactccgtgtggtgccagatgtacaacctttggccaacgatcataaagtatctccctggaaagcatatagaatttgcaaaaagaattgatgatgttaaaaacttcattcttgaaaaagtgaaggaacaccagaagtccctggatcctgccaaccctcgggactacattgactgttttctcagcaagattgaggaggagaaggacaacctgaagtctgagttccatctggagaacttggctgtctgtgggtctaacttgtttacggcaggcaccgagacaaccagcaccaccctgagattcgggctcctgctccttatgaagtatccagaggtgcaagccaaagttcatgaggaacttgaccgtgtgattggacgccaccaaccccccagcatgaaggacaagatgaagctgccttataccgatgctgtattgcatgagattcaaagatacatcactctggttggttccagtctgccccatgctgtggtccaggacacaaaattcagagactatgtcatccccaagggtactactgtactcccgatgctgtcttccgtcatgctggatcaaaaggagtttgccaacccagagaagtttgatccaggacactttctggataaaaatggctgcttcaagaagacagactactttgttcccttctcccttggaaagcgggcctgtgttggtgagagtttggcccggatggagctcttcctgttcttcaccacccttctgcaaaagttttccctgaagactctggtggagcccaaggaccttgacatcaagcctattactaccgggattatcaatttgccgccaccttacaagctgtgccttgttcctagataagggtttatccttttaatcattcaaatcaaagtaattgtttcctttttctataaatattctttttatgctaagcactgcctaggccagaaacatcatgcatgaaaaccacatggacatttatttcgatttaaaaatctaggtcttaaaagcttccaggacacaggcagtgtgtctgtgtccctcaactgctctagaaaccaggccccaagcacaactgacaccagatatgcaagaccctcatcagacgccacctacaagtagcactgtgtgctcttctgtagctttggaaatagaattgttttctgtcattgtttcaatagagaaattaatgtaatggcctacgttcattttcctgttcacacttaaaaacatttacatgatttgtgccacattcacaaaataaattctcaccctgacaataaaaaaaaaggaattcctgttggccgagttgtcagtcagcgtgaactctgccaccagctccctaagaaggggcattgaaggacccttcataggtttttggaggtaataaagccaggatatcatagagccttaagcggaccattgcagcactagctttcaggtgggggaattccaaaaaaaaaaaaaaaaaaaaaaaaaaaaaaaaaaaaaaaaaaaaaaaaaaaaaaaaaaaggaatt

SEQ ID NO: 3707 - DNA, 1271 bp, Rattus norvegicus
  Genbank Accession No. NM_031840
ttatatttgggttctgcctactgagccgggagtctgggaactacaactcccagagtgctgagcggatgcacgctctgcttttaggtgtaagccgcaaacatcttggaccccgggagaatccgcgttgaagcacagagcatttagctcctctgtcagaatgaatggggaccagaaactggatgttcataaccaagaaaagcagaatttcatccagcacttctcccagattgtcaaggtgctgactgaggatgaactgggacacccagagaagggagatgctattacccggatcaaagaggtcctggagtacaacactgtaggaggcaagtacaatcggggtctgacggtggtacagaccttccaggaactggtggaaccaaggaaacaggatgctgagagcctacagcgggccctgacggtgggctggtgtgtagaactgctccaggctttcttcctcgtgttagatgacatcatggactcttcccacactcgccgggggcagatctgctggtatcagaagccgggcataggcttggatgccatcaacgatgctctgcttctggaagccgctatctaccgcctgcttaagttctactgcagggagcagccctactacctcaacctgctggagctctttctacagagttcctatcagactgagatcgggcagactctcgacctcatcacagcaccccagggccaagtggatcttggtagatacactgaaaagaggtacaaatctatcgtcaagtacaagacagctttctactctttctacctgcctatcgcggctgccatgtacatggctggaattgatggggagaaggaacacgctaatgccctgaagatcctgctggagatgggcgagttcttccagatccaggacgactaccttgatctctttggagaccccagtgtgaccggaaaggtcggcactgacatccaggacaacaaatgcagctggctggtggttcagtgtctgctacgagccactcctcagcagcgccagatcttagaggagaattatgggcagaaggacccagaaaaagtggcgcgggtgaaagcactgtacgaggagctggatctgcggagtgtgttcttcaagtacgaggaagacagttacaaccgcctcaagagtctcatagagcagtgctccgcgcccctgcccccatccatcttcctggaactagcaaacaagatctacaagcggagaaagtaacctcgaattgtagaggctgcgagggaggggtctcaataaattattgttcaac

SEQ ID NO: 3708 - DNA, 1688 bp, Rattus norvegicus
  Genbank Accession No. NM_031851
cagaaggagtcatggctgccaaagtgtttgagtccatcggaaagttcggcctggccttagcagttgcaggaggcgtggtgaactctgctctatataacgtggatgccggacacagagctgtcatcttcgaccgattccgtggcgtgcaggacatcgtggtaggggaagggactcacttcctcatcccctgggtacagaagccaatcatctttgactgccgctctcgaccacgtaatgtgccggtcatcaccggcagcaaagacttgcagaatgtcaacatcacactacgtatcctcttccggccggtggccagccagcttcctcgtatctacaccagcattggcgaggactatgatgagcgggtgctgccatctatcaccacagagatcctcaagtcggtggtggctcgattcgatgctggagaattgattacccagcgagagctggtctccaggcaggtgagtgatgacctcacagagcgagcagcaacattcgggctcatcctggatgacgtgtccctgacacatctgaccttcgggaaggagttcacagaggcggtggaagccaaacaggtggctcagcaggaagcagagagagccagatttgtggtggaaaaggctgagcagcagaagaaggcggccatcatctctgctgagggtgactccaaagcggctgagctgatcgccaactcactggccaccgccggggatggcctgatcgagctgcgaaagctggaagctgctgaggacattgcttatcagctctcccgctctcggaacatcacctacctgccagcagggcagtccgtgctcctccagctcccccagtaaggccagccagccagggcctccatcgctctgaatgacgccttccttctgccccaccccagaaatcactgtgaaatttaatgattggcttaacatgaaggaaataaaggtaaaatcacttcatatctctaattatcaaatgaagcttttattgttacactttttgcccactttcataacaaaattgccaagtgcctatgcagactggccttccaccctgggtgctggcagtcggcggaagaaaggcagggcagtgtgtgtggtggacggggagccagctggcagcctgagtagaccttgagcctccattctgccatatattgaagatttacagacagtggtgcacacacgtgaaccaaaagcaagccctcaatttttccagccatacgaacccggacagatgcagctgaggagggcctgaggaagtggtctgtcttaactgtaaggccattccctcttaaccgtgaccagcggaagcaggtgtgtgcgtgcgactagggcatggagtgaagaatctgcccatcacggtgggtgggcctaattttgctgcccccaccagagacctaaactttggatagacttggatagaataagaggcctggactgagatgtgagtcctgtggaagacttcctgtccaccccccacattggtcctctcaaataccaatgggattccagcttgaaggattgcatctgccggggctgagcacacctgccaaggacacgtgcgcctgccttcccgctccctctcttcgagattgcccttccttcccaagggctgtgggccagagctccgaaggaagcaatcaaggaaagaaaacacaatgtaagctgctgtcaataaatgacacccagaccctc

SEQ ID NO: 3709 - DNA, 512 bp, Rattus norvegicus
  Genbank Accession No. NM_031853
acttgattgcttccctcttctgagcttgctcccgcgctttcagcatccaggtcacctcgccagtatgtctcaggctgattttgacaaagccgctgaggaggtgaagcgcctcaagactcagccaactgatgaagagatgctgttcatctacagccacttcaaacaagctactgtgggcgatgtaaacacagatcggccggggctgttggacctcaagggcaaagccaagtgggactcgtggaacaagctgaaaggaacttccaaggaaaatgccatgaagacctatgtggaaaaggtagaagagctaaagaagaaatatggaatataaacgaccagatttggtggccagccacatgtgtgacataatacctgtgaggacataatgccttggtgtttttttttttttctaatgtagatgacatggctctgatatgttagggccagagttaattactgctcctccttcctttggagtttttacctgaaatcaattaaaagtacatttgttactc

SEQ ID NO: 3710 - DNA, 1342 bp, Rattus norvegicus
  Genbank Accession No. NM_031855
gcagccagacgccaggctggatgaaatgaagaaggcaatggcaggcagtggtgccagcctctgaggtgtcgagctgctacctcccaccgctcatctctcacacaatgccatcaaacccctgcaagccacacttcttgccagccacctggcacccgaatctcagggcctcctgcatgctgtttcccttggagaggctgaagagacagagtctagcaggaatcccctccgcttgcgggtaggaagcttggggagcagcctcatggaagagaagcagatcctgtgcgtggggctggtggtgctggacatcatcaatgtggtggacaaatacccagaggaagacacggatcgcaggtgcctatcccagagatggcagcgtggaggcaacgcgtccaactcctgcactgtgctttccttgctcggagcccgctgtgccttcatgggctcgctggcccatggccatgttgccgacttcctggtggccgacttcaggcggaggggtgtggatgtgtctcaagtggcctggcagagccagggagataccccttgctcctgctgcatcgtcaacaactccaatggctcccgtaccattattctctacgacacgaacctgccagatgtgtctgctaaggactttgagaaggtcgatctgacccggttcaagtggatccacattgagggccggaatgcatcggaacaggtaaagatgctacagcggatagaacagtacaatgccacgcagcctctgcagcagaaggtccgggtgtccgtggagatagagaagccccgagaggaactcttccagctgttcggctatggagaggtggtgtttgtcagcaaagatgtggccaagcacctggggttccggtcagcaggggaggccctgaagggcttgtacagtcgtgtgaagaaaggggctacgctcatctgtgcctgggctgaggagggagccgatgccctgggccccgacggccagctgctccactcagatgccttcccaccaccccgagtagtagacactctcggggctggagacaccttcaatgcctctgtcatcttcagcctctccaagggaaacagcatgcaggaggccctgagattcgggtgccaggtggctggcaagaagtgtggcttgcaggggtttgatggcattgtgtgagagatgagcggtgggaggtagcagctcgacacctcagaggctggcaccactgcctgccattgccttcttcatttcatccagcctggcgtctggctgcccagttccctgggccagtgtaggctgtggaacgggtctttctgtctcttctctgcagacacctggagcaaataaatcttcccctgagcc

SEQ ID NO: 3711 - DNA, 3513 bp, Rattus norvegicus
  Genbank Accession No. NM_031969
gtgcagccaccctcgcctgcctcgctcttccttccttcgctcgcaccatggctgatcagctgactgaagaacagattgctgaattcaaggaagctttctccctatttgataaagatggggacggcaccatcacaacaaaggagctggggactgtcatgcggtcactgggtcagaacccaacagaggctgaactgcaggatatgatcaacgaggtggatgccgacgggaatggcaccattgacttcccagagttcttgactatgatggctagaaaaatgaaagacacagatagcgaagaagaaatccgtgaggcattccgagtctttgacaaggatggcaatggctacatcagtgcggcagaactgcgccacgtcatgacaaacctcggggaaaagctaacagatgaagaagtagacgaaatgatcagagaagcagatattgatggagacggacaggtcaactatgaagaattcgtacagatgatgactgcaaaatgaagacctactttcaactactttccccctctagaagaatcaaattgaaatcttttacttacctcttacaaaaaaaaaaaagaaaaaagaaaaaagttcatttcttcattctgtttgtatctagcaaaactgaatgtcaaaagtaccttctgtccacacacaaaatctgcatgtattggttggtggtcctgccccctaaagatcaagccccctacatgagttttacagtataaatactcgtactaccttataaggaagcacttagtggactccttcaagttccatttgctaatgattaacacactgtctgggctggccagtttctcatgcatgcagcttggtgattgagcacagtcaggcctttgtattaaaactgaaaaatggaaaaaacaaattcaaactctcagatggcttctagttcaatctgttcagataaatgtcagcagccagtttaccgcaaacaaacatttaaaattggtttacctcaggatgatgtgcaggaaacgggtgaaggctaaactttgagacacagccctagatgtaggacagtcctcttcaagtgccccaatcccatggtgacagtgacaccctggtggcgagcccgagtgtgatggttcaccgctgtgcacattgcattggagtgaagtgaacaaggctgtcaccaaatcacacacgttttaataagaaatgtttactaagggagcatctttggactctctgttttaaaaccttgtgaaccatgactcggagccagcagagtaggctgtgtctgtggacttgagcacaccatcaacattgctgttcaggaaattataatttacgtccattccaagttgtaaatgctagtcttttattttttttttccaataaaaagaccattaacttaaaagtggtgttaaatggtttgtaaagctgagcttggaagggggacaaggccgttggaggggaggtcagcggacatagaaacacccaacgtccagtacaagctggatttcccgcccaggttctctagcatcaacccctgaaaccagacagattctttgtcatctacgaccatgtaagtctagttattcaaatctgcgcgcatgcgcaaatcatggtgaattgatacttggagtagagccctagtgaaggaaggcctcaagcattcagtaaggatgtcttggctgtgctgctgctgacctgttgaagtacatgaggccatctgtgcaggagacatgatttagtgtgtgtgtaatcctatactcactgtgtatggtgaagcaggccagtcaaagacactacctttgattcagtttaatttatggttatacttaactttagccttttttattatttaagttcactgctttttctccccctaagtagagttaatgcttaacactgtcttgaaagcaaaacaatatcccagaatgaattttgtgtcttaattacgaacctgtaaccaaaacgtacatgtgctggtactggtcccttagcccaaggcactgggctatttaaaaagtcccccttaagaagtgtgttgcatttaaaacaagggccttgtacatttttcagggtgttaactggctgtatctgattaataaggagtgttggcttccaaattcgggggtggcagggagctggcaggcttgtagcaaggcaatgagaagcccttggcaaccacacgggtgcactcggggtaacctacagacccctggttgctccttctcctgctccctgtctttctggcgttttgtagctccttagaattttttttctttctgccaggaggataggtcagagcagtagagaggaagacattgcctgagcgcttctgctcatctttggactgggtggttggcagacaggtcgatgggtggtaaattgacttcagtatcggactcagtaggtattcccttttggtagagaggactgagggctccaggtgtgaagtgaatggccgtggatatgttgtgtaagaggattaagtcgcccagtcgatgacccagtctcaggcttgtggtctgttacctcttggtagtttcaaagggggtcggaggtggctttttaaaaacaatttaccccctatctttaaccatttaccaagtctgtagaagctgggtagacaatattttagcagctccgtagcctgtcctaaaaggttaccttctaaacaggattcttgtgtggccagggatcctgcatgggaactggaaacccctaacccccggggggtgggaagcaggagtttggaactgtaggaggcagagtccccccacctcctcagccttctggcatccaggggcacaagcagcccagggcttggtgttggcagtctgagttcgtgaggtagaaagagtggggtgtcaaggcagtacccctgaagttggatagtactttcctgtaaactgtccctcacttataactactctataaatatatgcatatatttatataaatatatatatataagtgactggttagctggcatcctgctttagcctgagacttgccctaagaaactgctgagcccttggtaaacgtctacacagtaagtttttctgtctgttggggggagctgttgaacaaggcagacatcttgatagttcagatgggctttaatgtactgttgccagggaaggctttttctggttttttgacaaatttttagcacacttcaattggtgtctcgagcaactttaacacattgaagatgaggtattgtacatatttttatattctctttataagtgcatgtctccaacttgtaaccaatattgtacggaatggctgtccagtaggcctagtgtttctgtcacacgagagggatagcatgtaccattcacccctcagcatcctgggagcttcttcttgaatgaagactgtaaatttggtcaagtcaactcttagttcggtttccttaccatttgaatgattgactgtgtgtcctgcgtgtatttctcttttggcagcgaccagagttacactgatgtgtctcaaccgacccactcggctggcaaccacctatttattttct

SEQ ID NO: 3712 - DNA, 787 bp, Rattus norvegicus
  Genbank Accession No. NM_031970
gcacttctcggatcctcagcccagtgcttctagatcctcagccctgaccagctcagccaagaccatgaccgagcgccgcgtgcccttctcgctactgcggagccccagctgggagccgttccgggactggtaccctgcccacagccgcctcttcgatcaagctttcggggtgcctcggtttcccgatgagtggtctcagtggttcagctccgctggttggcccggctatgtgcgccctctgcccgccgcgaccgccgagggccccgcagcagtgaccctggcccggccgttcagccgggcgctcaaccggcaactcagcagcggtgtgtcagagatccgacagacggccgatcgctggcgcgtgtccctggacgtcaaccacttcgctcctgaggagctcacagtgaagaccaaggaaggcgtggtggagatcactggcaagcacgaagaaaggcaggatgaacatggctacatctctcggtgcttcacccggaaatacacgctccctccaggtgtggaccccaccttggtgtcctcttccctgtcccctgagggcacactcacggtggaggctccgctgcccaaagcagtcacacaatcagcggagatcaccattccggtcactttcgaggcccgtgcccaaattggaggcccagagtcggaacagtctggagccaagtagaagccttcagcttgctacccatccccagtagccgtcaccagccctccctctctgtcaatctgaatgctcttttgatacatgtactttctgttttactcaaataaa

SEQ ID NO: 3713 - DNA, 2455 bp, Rattus norvegicus
  Genbank Accession No. NM_031971
agagaagcagagaagcagagcaagcggcgcgttcccgaacctcgggcaagaccagcctctcccagagcatccccaccgcgaacgcacccttctccagagcataccccagcggaggccacccttccccagagcatccccgccgccaagcgcaaccttccagaagcagaccgcagcgacatggccaagaaaacagcgatcggcatcgacctgggcaccacctactcgtgcgtgggcgtgttccagcacggcaaggtggagatcatcgccaacgaccagggcaaccgcacgacccccagctacgtggccttcaccgacaccgagcggctcatcggggacgccgccaagaaccaggtggcgctgaacccgcagaacaccgtgttcgacgcgaagcggctgatcggccgcaagttcggcgacccggtggtgcagtcggacatgaagcactggcccttccaggtggtgaacgacggcgacaagcccaaggtgcaggtgaactacaagggcgagaaccggtcgttctacccggaggagatctcgtccatggtgctgaccaagatgaaggagatcgccgaggcgtacctgggccacccggtgaccaacgcggtgatcaccgtgcccgcctacttcaacgactcgcagcggcaggccaccaaggacgcgggcgtgatcgcgggtctgaacgtgctgcggatcatcaacgagcccacggcggccgccatcgcctatgggctggaccggaccggcaagggcgagcgcaacgtgctcatcttcgacctggggggcggcacgttcgacgtgtccatcctgacgatcgacgacggcatcttcgaggtgaaggccacggcgggcgacaccgacctgggcggggaggacttcgacaaccggctggtgagccacttcgtggaggagttcaagaggaagcacaagaaggacatcagccagaacaagcgcgcggtgcggcgcctgcgcacggcgtgcgagagggccaagaggacgctgtcgtccagcacccaggccagcctggagatcgactctctgttcgagggcatcgacttctacacgtccatcacgcgggcgcggttcgaggagctgtgctcggacctgttccgcggcacgctggagcccgtggagaaggccctgcgcgacgccaagctggacaaggcgcagatccacgacctggtgctggtgggcggctcgacgcgcatccccaaggtgcagaagctgctgcaggacttcttcaacgggcgcgacctgaacaagagcatcaatccggacgaggcggtggcctacggggcggcggtgcaggcggccatcctgatgggggacaagtcggagaacgtgcaggacctgctgctgctggacgtggcgccgctgtcgctgggtctggagaccgcgggcggcgtgatgacggcgctcatcaagcgcaactccaccatccccaccaagcagacgcagaccttcaccacctactcggacaaccagcccggggtgctgatccaggtgtacgagggcgagagggccatgacgcgcgacaacaacctgctggggcgcttcgagttgagcggcatcccgccggctcccaggggcgtgccccagatcgaggtgaccttcgacatcgacgccaacggcatcctgaacgtcacggccacggacaagagcaccggcaaggccaacaagatcaccatcaccaacgacaagggccgcctgagcaaggaggagatcgagcgcatggtgcaggaggccgagcgctacaaggcggaggacgaggtgcagcgcgagagggtggctgccaagaatgcgctcgagtcctacgccttcaatatgaagagcgccgtggaggacgagggtctcaagggcaagatcagcgaggctgacaagaagaaggtgctggacaagtgccaggaggtcatctcctggctggactctaacacgctggctgagaaagaggagttcgtgcacaagcgggaggagctggagcgggtgtgcaacccgatcatcagcgggctgtatcagggtgcgggtgctcccggggctgggggcttcggggcccaggcgcccaagggaggctctgggtcggggcccaccatcgaggaggtggattagaggcttttctggctctcagggtgttggctagagacagactcttgatggctgctggtgcacgattcttatcaagttactccttctctccggagttcagtttaaagttacagccttttatacggtaattgatttgagtttgttacattttgtatgctcgtgggttttttatatattcaaattaaggttgcatgttctttgcgtttaatctaagtagctgtgtaaaaatggtgtttccttcctgcgaacacctcagcactgccaccctgtgtacagttttttccttgcatccctacaaactgagaaaaaaagttatcttttgtaacttaaacattcaaaataaaatgttacaagt

SEQ ID NO: 3714 - DNA, 1725 bp, Rattus norvegicus
  Genbank Accession No. NM_031972
gaattcctgctgcacccatatttgaatattgttttatcctcatcacgcgaacttcctggggaaggactccaaggtccaagtgggcgggaaggagggtccttaaatgtgccctctttcagctcttgctcattccaggagtcccagctgctggagaaggctgtgtaggagttgcaatgagcagtatcagtgacaccgtgaaacgggccagggaggcctttaactccggcaagactcgatcgctgcagttccgaatccagcagttggaggcgctgcagcgcatgatcaatgagaacctgaaaagcatctctggggcgctggcctctgacctgggcaagaacgaatggacctcctactatgaggaagtggctcacgtactggaggagcttgataccacaattaaggagctccctgattgggctgaggatgagcctgtggccaagactcgccagacccagcaggatgacctctacatccactcggagcccctgggtgtggtccttgtcataggtgcttggaactaccccttcaacctcaccatccagcccatggtgggtgccgttgctgcaggaaacgcagtgatcctcaagccctcagaagtgagcgggcacatggcagacctgctagcgacactcatccctcagtatatggaccagaatctgtacctagtggtcaaagggggtgtccctgaaaccacggagctgctcaaagagaggtttgaccacatcatgtacactgggagcacagccgtagggaagattgttatggccgctgccgccaagcatctgactcctgtcaccctggagcttggagggaaaagcccttgttacgtggacaaggactgtgatctagatgtggcttgcaggcgtatcgcctgggggaaatttatgaacagtggccagacctgtgtggccccagactacatcctctgtgacccctcgattcagaaccaaatcgtggagaagctcaagaagtcactcaaagatttctatggggaagatgctaagcagtcccgtgattatgggaggatcatcaatgaccgtcacttccagcgggtcaaaggcctgattgacaaccagaaagtagcccatggaggcacttgggaccagtcctcacgatacatagctccaaccatcctggtggatgtggacccccagtccccagtgatgcaggaggagatctttgggccggtgatgcccattgtgtgtgttcgaagcttggaggaggccattcaatttatcaaccagcgtgagaagcccctggcactctatgtgttctccaacaatgagaaggtgatcaagaaaatgatcgcagagacatccagcggtggagtgacagccaatgacgtcattgttcacatcaccgtgcccactttgccctttggtggtgtggggaacagcggcatgggggcctaccatggcaagaaaagcttcgagaccttctcccaccgccgctcttgcctggtgaagtctctgttgaatgaagaagctcacaaggccaggtatcccccaagcccagccaagatgccccggcactgagagagtgctgctgcacctgacacatgttttgctggctgtcttgtccttgaggagttgctcatggagcctcatcctggcttattcccacctgccgtcctgtgcttaactccccgaaggactctcacctcactcctccaaattccactgtttgctgggcacagaaatcaataaaagcctctgaggaaaagtc

SEQ ID NO: 3715 - DNA, 936 bp, Rattus norvegicus
  Genbank Accession No. NM_031975
gaattccggccgccgccaccgcgccaagttccggccgcggccaccttccgccgtccagggctcctccgcctcggccccgggaccccggctccccgccagccccggccccggcaccatgtcggagaagagcgtggaggcagcggccgagctaagcgccaaggacctgaaggaaaagaaggacaaggtggaggagaaggctggccggaaagaacggaagaaagaagtagtggaggaggaggagaatggagctgaggaggaggaagaagaaactgctgaggatggagaggatgatgatgaaggagacgaagaagatgaggaggaagaggaggaggaggatgaaggccccgtgcggaagagaactgctgaagaggaggatgaagcggatcccaagaggcagaagacagaaaacggggcgtcggcttgagcccctgcccgtgggcttggggatgggaggcccctcaggtcctggaggtggggcaggaacacacaaatccagccccccttctcctggctccctcgtctggccctgccccagagctgtgacccttgccctttgacccagcctctcatttccatctctccagacactgctccttcaccctcactgccacaggtccagcccccaacccgcctcatccaagctccccagccggccctcacttgccctagcattccttgttcttccctgccttcctcaccatcgatctgttccagtccttgcgaagcctctccttcccctctgcaccccgagcctctcagcctgcccttctctctcctgcctgacccctgggtctccctcagattccctcctctcagacagcgccaggccggggtggggctggggttggggccaagccccgaagctgccccctcccctttttgtataatttaataaagaaacggtcgcgcttcaaaaaaaaaaaaaaaacggaattc

SEQ ID NO: 3716 - DNA, 1978 bp, Rattus norvegicus
  Genbank Accession No. NM_031976
  misc_feature (1)..(1978): n = a or c or g or t
ctcgctgcggtccaagcaggtaaagcggggctcggcgaacgcgcgcgacccgaggggcgtggtccgcggtcccgggggtcccggcccggcccttcccgcttccctgtgtccccgcagacacttcgccatgggcaatacgagcagcgagcgcgccgcgctggagcggcaggctggccataagacgccgcggagggacagctcggagggcaccaaggatggggacaggcccaagatcctgatggacagccccgaagacgccgacatcttccacaccgaggaaatgaaggctccagagaaggaggagttcctggcgtggcagcacgacctcgaggtgaatgagaaagcccccgcccaggctcggcccaccgtatttcgatggacagggggtggaaaggaggtctacttgtctggatccttcaacaactggagcaaattgcccctcactagaagccaaaacaacttcgtagccatcctggacctnccggaaggagagcatcagtacaagttctttgtggatggccagtggacccacgatccttccgagccaatagtaaccagccagcttggcacagttaacaacatcattcaagtgaagaaaactgactttgaagtatttgatgctttaatggtggattcccaaaagtgctccgatgtatctgagctgtccagttcccccccaggaccctaccaccaggagccttacatctctaaaccagaggagcggttcaaggccccgcccatcctcccgcctcacctgctgcaggtcatcttgaacaaggacacgggcatctcttgtgatccagcgctgcttccggagcccaaccacgtcatgctgaaccacctctatgcactctctatcaaggatggagtgatggtgctcagtgcgacccatcggtacaagaaaaagtacgtcaccaccctcctctacaagcccatatgagaggatgagccagccgtgggccacgggacagcaggcgggagccgctgggctctccgtgtgcatgcgcatcctcactccgggacatctcacccccacatagtcctccttgaaggtctgtccaggcacagccagaaatcggatggacggcagaccgtggtcccagcaccgcaggcagtgcgccaggctctagtgctctaagcatcatccctctgctggcccgagatgtctacagccagacctgaatgctggttcctgctagaaaacctaggacaggaactgaagtcaccaaagccctcatcatccctgctgaagcctggcttggaagaaagcagtgctcggtcttgcctgtccttccgaatcacagcagtagattgtagactccatggaatttcagtgtccaatttccagatgcagcttcgcaatcgattcctgacactgtgcactgagaccttcttaaccagagtggctggctgtccactctcacttaaggcaataagtcaccaggacgagactataggtcatgtgactactgagcaataatcgttctcanacagacatcagaaaccactgccatttctccatcaagccagacgatcctgaggactgaccaccatgggaggttgtccaccttatttcagttgcagtgttggccatgttaccgtgacaacctggtcgaagtgcccgccctctttttagttctagcacgtgctactcagctgggggccgtgtctccagtgagcagagagtgtacacggtggttactattgcctgatcctaagagagcttggcaccctgcggcagactgctaggttccagcagggttggcacgagtgaacctatgtgtgctcagtgtgatttccacagtgatgtcacagacgtgcccattggtacaggctcctgtcacctgtcagcataggtaggcacaagctctgtggtgtccgctatttggttaaacctgagttttgggtaccttttgttactgttttcaaaacacggacttgctgtcatcttgatgtacaagtttcaataaagctttgg

SEQ ID NO: 3717 - DNA, 3089 bp, Rattus norvegicus
  Genbank Accession No. NM_031978
gatacactgcgcagtggaacggcgagtgcagggcgcagccatgatcacttcagccgctggaattatttctcttctggatgaagaagagccacagctcaaggaatttgcactacacaaattgaatgcagttgtgaatgacttctgggcagaaatttctgagtctgtagacaaaatagaagttttatatgaagatgaaggtttccgcagtcggcagtttgcagccttggtggcatcgaaagtattttatcacctgggggctttcgaggagtctctgaattatgctcttggagcaggtgacctcttcaatgtcaatgataactctgaatatgtggagactattatagcaaaatgcattgatcattataccaaacagtgtgtggaaaatgcagatttgcctgaaggagaaaagaagccaattgaccagagattggaaggcatcgtgaataagatgttccagcgatgtctcgatgatcacaagtataagcaagcgattggcattgctctggagaccaggagactagatgtgtttgagaagactatactggaatctaatgatgtcccaggaatgctagcttacagcctcaagctctgcatgtctttaatgcagaataagcagtttcggaataaagtattgcgagtcctggttaaaatctacatgaacttggaaaaacctgatttcatcaatgtttgtcagtgcttaatcttcttagatgacacccaggccgtgagtgatatcttagaaaagctggtaaaggaagacaacctgctgatggcctatcagatttgctttgatttgtacgaaagtgccagccagcagtttttgtcatctgtgatccagaatcttcgaactgttgggacccctattgcttctgtgcctggatctaccaatacgggtactgtgccaggaccagagaaagacagtgactctatggagaccgaggagaagacagccggtgcagtggcagggaaaacaccagacgctagtccagagcccaaggaccagacattgaaaatgattaaaattttaagtggtgaaatggctatcgagttacacctgcagttcctaatacgcaataataacacagacctcatgattctgaaaaacacaaaggatgcagtacgaaattctgtatgtcatacagcaactgtaatagcaaactcattcatgcactgtgggactaccagtgaccagttccttagagataacttggaatggctggccagagccactaactgggccaaatttactgcaactgccagcttgggtgtaatccataagggccatgagaaggaagcactacagttaatggcaacatacctccctaaggacacttctccaggatcagcctatcaggaaggtggaggtctctatgcattgggtctcattcatgccaatcatggtggtgacataattgactatctccttaatcagctcaagaatgccagcaatgatatcgttagacatggaggcagcttgggccttggtttggctgcaatgggaactgcacgtcaggatgtatatgatttgctgaaaacaaacctgtatcaggatgatgctgtgacaggggaggcagctggcctggccttaggtttggttatgttaggctctaaaaacacccaggcgattgaggatatggttggctatgcacaagaaactcaacacgagaagattctgcgtggtctagcagttggcattgcgttagtgatgtatgggaggatggaggaggccgatgctctcattgaatctctctgtcgtgataaggacccaattcttagaagatctggaatgtatactgtagccatggcttattgtggctctggtaacaataaagctattcgacgcctgctgcatgttgctgtaagtgatgtcaacgatgatgtcagaagagcagcagtagagtctcttggcttcattttgttcaggacgcctgaacagtgtccaagtgtggtctctttgttgtccgagagttataaccctcatgtgcgctacggcgctgcaatggccctgggagtctgctgtgctggtacaggaaacaaggaagcaattaatttactggagccaatgaccaatgaccctgtgaactacgtgcggcaaggggctctgatagcctcagctctcatcatgatccaacagaccgaaatcacgtgtccaaaggtaaaccagttccggcagctgtattccaaagtcatcaatgacaagcatgatgatgtcatggccaaatttggcgctattctggcccaaggcatactggatgcaggtggtcataatgtcacaatctccttacagtccaggactgggcacactcatatgccttctgtggttggcgtccttgtctttacccagttctggttctggtttcccctttcacacttcctatcattggcttatactcctacctgtatcatcggccttaacaaggatttaaagatgccgaaagttcaatataaatcaaattgtaaaccatccacattcgcataccctgcccctctggaagttccaaaagaaaaagaaaaggaaaaggtttccaccgctgtgttgtctattactgccaaagctaaaaaaaaagaaaaagaaaaagaaaaaaaggaggaggagaagatggaagtggacgaagcagaaaagaaggaagagaaagagaagaaaaaagaaccggaaccaaacttccagctgttggataatccagcacgggtcatgcctgcccagctgaaggtcttaagtatgacagagacctgcagataccaacccttcaagccactctccatcgggggcatcataattctgaaagacaccagcgaagacattgaggaacttgtggaacccgtggcagcacatggcccaaagattgaagaggaggagcaggagccagagcccccagagccatttgagtacatcgatgactagggccagggatcccacctgctcagctgtagatgactatcctggcacacactgaaatgtcgtgagggaacccacgctgagacccgctcgatccacacatcattgcctacgctgacataaggaacccgtgtcctgagtctttgattgagaagattctgactgttcagtgttctctttcacaaaaaaaaaa

SEQ ID NO: 3718 - DNA, 1846 bp, Rattus norvegicus
  Genbank Accession No. NM_031980
cggatgcctgggaagtggatttctgctctgctcctgctgcaaataagtttctgctttaaatctgggaactgcggaaaggtgttggtatggccgatggaatatagtcactggatgaatataaagataatactagaggaacttgtacagaagggccatgaagtcactgttctgagaccttcagcttctgtctttcttgatcccaaggaaacttctcaccttaaatttgtaacttttcctacatctttcagtagtcatgacctggaaaatttttttacaaggtttgtgagtgtatggacttatgagttgccaagagacacatgtttgtcatattttctttatctacaagatacgattgatgaatattctgactactgtctgactgtttgtaaagaagcagtttcaaacaaacagttcatgacaaaactacaggaatccaaatttgatgtcgttttctcagatgccattggtccctgtggagagctgatagctgaactgctccagattccttttctgtacagtcttcgcttctctcctggctacacaattgaaaagtacattggaggagttctattccctccttcctatgtacccatgattttttcaggattagctggccaaatgacattcatagagagggtacacaatatgatatgtatgctttattttgacttttggttccaaacatttagagagaagaaatgggatccattttacagcaaaactttaggaaggcccaccacattagctgagataatgggcaaagcagaaatgtggctcattagatcctactgggatttggagtttccccacccaatatcgccaaatgttgactacattggaggactccactgcaaacctgctaaacccttgcccaaggatattgaagacttcgtccagagctctggagagcatggtgtggtggtgttttctctggggtcaatggtcaggaacatgacagaagaaaaggccaacatcattgcatgggcccttgcccagattccacaaaaggttctttggagatttgacggcaaaaaacccaccaccttaggacccaataccagactctacaagtggcttccccaaaatgatcttcttggtcatccaaaaaccaaagcctttgtaacgcatggtggagccaatggcatctatgaggcgatccatcatggaatccctatgattggcattcccttatttggagagcaacatgataacattgcccacatggtggccaaaggagcagccgccacagtaaatttcaggacaatgtcaaagtcagatttgctcaatgcactggaggaagacatagacaatcctttttataaaaagaatgctatgtggttgtcaaccattcaccatgaccagcctacgaagccactggacagagctgtcttctggattgagtttgtcatgcgccacaaaggggccttgcacctgagatcacttggacataaccttccctggtacctgtaccactctctggatgtgattggattcctactttcctgtgtggcagtcactgtagtccttgctctaaagtgctttttatttgtttatcgattctttgtaaagaaggaaaagaaaacaaagaatgagtagagctcaatgataatgcatcacatgaatgaaatttgttcatcattttaagttatgaaccaccttctaaaaattcattaataactttacagaagcatattgtaattttgtatcatgtaaaaagacatataattctgaggcttctgatatgtgatcaaagaatcccatcatttattttaattttcaaactattcaatgtaaaacaatttgcctgtgtagaaaaatatataaataaagatttaattgaaaaaaa

SEQ ID NO: 3719 - DNA, 1451 bp, Rattus norvegicus
  Genbank Accession No. NM_031981
gccaggcgccctgccgctggacactgtagaacggcgggcggaacgcagacctgggttcgggctgttgcagtgtccgccggagcggtttggggagtgcacggggtgaagatggcggaggagcggcaggacgcgttgagggagttcgtggcggtgacgggcgctgaggaggaccgggcccgtttcttcttggagtcagctggctgggacctgcagattgcacttgcaagcttttatgaggatggaggggatgaagacattgtgaccatttcacaggcaaccccaagttcagtgtccagaggcacagctcctagtgataatagagtaacatccttcagagacctcattcatgaccaagatgaagaggaagaggaagaagagggacagaggttttatgctgggggctcagagagaagtggacagcagattgttggtcctccccggaagaaaagtcccaacgagctggtggatgatctgtttaagggtgccaaagagcatggggctgtagctgtggaacgagtgaccaagagccctggagagaccagtaaaccgagaccatttgcaggagggggctaccgccttggagcagcaccagaagaggagtctgcctatgtggcaggagaaaggaggcggcattcaggccaggatgttcatgtagtgctaaagctctggaaaactggattcagcctagacaatggtgaccttagaagctaccaagacccatccaatgcccagtttctggagtctatccgtagaggggaggttcctgcagagcttcggaggttagctcacggtgggcaggtgaacttggatatggaggatcatcgggacgaggacttcgtgaagcccaagggagctttcaaagccttcactggcgagggccagaaactaggcagcacggccccgcaggttttaaacaccagctctccagcccagcaagcagaaaatgaagccaaagctagctcgtccatcttaatcaatgaggcagaacctaccacgaacatccaaatccgactggcagatggcgggagactggtgcagaaattcaaccacagccacaggatcagcgacatccggctcttcatcgtggatgcacggccggctatggctgccaccagttttgtccttatgactaccttccctaacaaagagctggctgatgagaaccaaaccctgaaggaagccaatcttctcaacgctgtcatcgtgcagcggttaacataaccgcccagctgctgcctcacctccctatgtgtcccccatgactgtggccatgcccgtggggattacctcctgccccctgtacacctagctcttccagtgccacgtctcgtccgtagctctggattcttagacttcagttggacatttgttttctctttagttgtatttcctgggtttttgtgatgatcaatggactttaaagaaaaaaaataaaaaacacaaaaaattgg

SEQ ID NO: 3720 - DNA, 2287 bp, Rattus norvegicus
  Genbank Accession No. NM_031985
gtctgcggcgggtccgggcccatgaggcgacgacggaggcgggacggcttttacccagcgcctgacttccgacacagggaagctgaggacatggcaggagtgtttgacatagacctggaccagccagaggatgcaggctctgaggatgagctggaggaggggggtcagttaaatgaaagcatggaccatgggggagttggaccatatgaacttggcatggaacattgtgagaaatttgaaatctcagaaactagtgtgaacagagggccagaaaaaatcagaccagaatgttttgagctacttcgggtacttggtaaagggggctatggaaaggtttttcaagtacgaaaagtaacaggagcaaatactgggaagatatttgccatgaaggtgcttaaaaaggcaatgatagtaagaaatgctaaagatacagctcatacaaaagcagagcggaatattctggaggaagtaaagcatcccttcattgtggatttaatttatgcctttcagaccggtggaaaactctacctcatccttgagtatctcagtggaggagaactatttatgcagttagaaagagaggggatattcatggaagatacagcttgcttttacttggctgaaatctccatggctttggggcatttacatcaaaaggggattatctacagagacctgaagccggagaacatcatgcttaatcaccaaggtcacgtgaagctgacagactttggactatgcaaagaatctattcatgatggaacagtcacgcacacattttgtggaacaatagaatacatggcccctgaaatcttgatgagaagcggccacaaccgtgctgtggattggtggagtctgggagcattaatgtatgacatgctgactggagcacctccattcactggggagaatagaaagaagacaattgacaaaatcctcaaatgtaaacttaatttgcctccctacctcacacaagaagctcgagatctgcttaaaaagctgctgaagagaaatgctgcttctcgtcttggagctggccctggggatgctggagaagtccaagcgcatccattttttagacacattaactgggaagagcttttggctcggaaggtggagcgcccctttaagcctctgttgcaatctgaagaggatgtgagtcagtttgattcaaagtttactcgtcagacacctgttgacagccccgatgactcaactctcagtgaaagtgccaaccaggtctttctgggttttacatatgtggctccatctgtacttgaaagtgtgaaagaaaagttttcttttgaaccaaaaatccgatcgcctcgaagatttattggtagcccacgaacgcctgtcagcccagtcaaattctctcctggggatttctggggacgaggtgcttcagccagcacagcaaatcctcagacacctgtggaatacccaatggaaacaagtggaatagagcagatggatgtgacaacgagcggggaagcttcagcgccacttccaatccgacagcccaactctgggccatacaaaaaacaagcttttcctatgatctccaaacggccagagcacctgcgtatgaatctatgatgaaacaatgcttttattaatgcaaatgcaaaaaggaaacaaatcctggaagggcatgtgtgaggatcctgcaagataaaaatgagaaaatggcagtctcaaagagtcagtgtcattacctggaatgctttcgatggaggaaaaaataaacatggatttttaaaaaaatcaatcaatggtgcaaaaaataaacccacaaaaaactcaaacaaaatagtattgtggaacccacagacacatcaactgactggttcctaccctagcaacatctcagcgttcgtaaggattctcatgctgatggccgtaaactgacagtattaagggtaggatgttgcttctgaatcactggtaaagtctgatgatgtcacataagggttatcctaataggcaaagtacaagattgcctgtaatacttgcaactaaggacaaattagcatgcaagctttgtcaaactttttccagcaacacagaatcaaagacaaaagaaacttatcgattgatgttttacgtgcaaacaacctgaatcttttttttatataaatatatatttttcaaatagatttttgattcagctcattatgaaaaacatcccaaactttaaaatgcgaagttattggttggtgtgaagaaagccagcttctgttcttctcttgatgaaataaaatgcaaatggatcattgttaaaaaa

SEQ ID NO: 3721 - DNA, 2077 bp, Rattus norvegicus
  Genbank Accession No. NM_031986
gacccacgcgtccgggagccggagcgagcggcaggaacaacgcggtgttcggggcagaaaacacctgcaaaaatgtctctctatccatctcttgaagatttgaaggtagacaaagtaattcaggctcaaactgcctcttctgctaatcctgccagccaggccttttttttaaatgtggtcgattctgctgccttccctccaggtggaaatctctatcctaaactgtatccagaactctctcaatacatgggactgtctttaagtgaagctgaaatatgtgaaaacatgcctgtggtctctggagcgccaacccaagggcagttggtagcaaggccatccagtgtgaactacatggtagcacctgtgacaggtaacgatgcggggattaggagagcagagattaagcaagggattcgggaagtcattttgtgtaaggatcaagatggaaaaattgggctcagactgaagtcagtagataatggtatatttgttcaactagtccaggctaattccccagcctccttggttgggctgcgatttggggaccaggtgctccagatcaatggtgaaaactgtgccggctggagctccgataaggcacacaaggtgctcaagcaggcctttggagagaagattaccatgaccattcgtgatagaccctttgaacggacagttaccatgcataaggacagcagtggacatgttggctttatctttaaaagtggaaaaatcacatccatagtgaaagacagttctgctgccagaaacggccttctcactgatcaccacatctgtgagatcaacggacagaacgtcattggcttgaaggatgctcagattgcagatatactgtcaacagctgggactgtggtcaccatcacaatcatgcctgcctttatcttcgaacatattattaaacggatggctcccagcattatgaaaagcctgatggatcacaccattcctgaagtttaaaccttgtacagtgcatcaccgccgaacgcttccagtcttcctcttcggcaacttctctatttcaccgcacatgaagctttcccggatccagggagactgtgctgcatggagacctgtctatcttccaccatggctgggaacctcactctatctgagagcgtcttcagattttaagataggtgtagccttatcctggttttacagatgtgaactctcaaaagattccctgactttctagacttggttctttactgggaacctgatgtttttctataagccattgtgattaggatgactggtgtaggcttagctgtgtccgagaactggtctgctttctccgagaagtgcacagtgctaggcacgtgcttcagttctgtggcatatgtggagtgtagtacatcagcatagtacctgtaggatgagtgcctttgatcgcaactttttaagtgtgtgtgtgagtgtgtaaaattccagttaatcaacacttcattcacaaaagcattatacagttctgtgtaggtggcaagagactaatgattgtcactaaattctaacaccttcacctaatgtgcttcagttgtcgcctaacacagaagcatttagataaagcaaatagaaattattgctgccttctgaaacctgagaggtagctctctatcaagctgttctatgctagccctgagcagcttactggtgtcgcagagctgcctagctgtaccaagattttctagtcactgcataaaggaaacgcctaagagttgccgtattgctttctgagatacaaattgctatatatttcatgtaaaagttgttatactaaataggataaattttggagtctcttttcactcgtagataaagtgggtaatatctaatttggcacttgagtcctaacattatgtaactttagctaggttggggtgggtttagaatgtttccctagtcatctcagtttgttccattttctgactctatcctgcaaacaaaaatggcaatgacactttatcctgactctttccttcttagtttgtgcctatcttattattttatgtgatattatcctattaaatgtataaaaatattaaaaaaaaaaaaaaaaaaa

SEQ ID NO: 3722 - DNA, 2681 bp, Rattus norvegicus
  Genbank Accession No. NM_031987
gagtgcagagagccaagccgggtgcaggagttttcttactgtgactataccatggaaaatcaattggctaagtcaattgaagaacgaacattccagtaccaggactctcttccgcccttgcccgttccttcgcttgaagaatcactgaagaagtaccttgagtcagtgaagccatttgcaaatgaagacgaatacaagaaaactgaagaaatagttcaaaagtttcaagatggagttggcaagacattgcatcagaagttacttgaaagggctaaaggaaaaagaaactggctggaagagtggtggctcaatgtcgcctacttggatgtgcgtattccatcacaactgaacgtgaactttgtgggtccgtctccccactttgaacactactggcctgcaagggaaggcactcagttggaaagaggaagcatactactgtggcacaacttgaactactggcagctgctaagaagagaaaaattgcctgtacataaatctggaaatactcctctagacatgaaccaattccggatgctgttttctacctgcaaggttccgggaatcactagagattcgattatgaattattttaagactgagagcgaggggcattgtccgacccacattgccgtgctgtgtcgaggcagagcgtttgtcttcgatgtcctccatgacggttgtttgatcaccccaccagaacttctcagacaactgacatacatctaccagaaatgctggaatgaacctgttgggcccagtatagcggcattaaccagtgaggagcgaactcggtgggcgaaggcaagagaatatctgattggtcttgatccagagaacttgactttattagaaaaaattcaatccagtttatttgtgtattccatagaagacaccagtccacatgcaaccccagaaaatttttctcaggtctttgaaatgcttcttggtggagatccagcagtgcgctggggtgacaagtcctataatctgatttcctttgctaacggaatatttggctgtagctgtgatcatgctccttatgatgcaatgcttatggtgaacattgctcactatgttgatgagaagctcctagagacggaagggagatggaagggttcagaaaaagtccgggatataccgttgccagaggagctggctttcactgtggatgagaagatactgaatgacgtctaccaagccaaagcccaacacctcaaagcagcatctgatttacagatagcagcatctaccttcacatcttttggcaaaaagctcactaagaaggaggcccttcaccctgacacctttattcagctcgctcttcagctcgcctactacagacttcatggacgccccggttgctgctatgaaacagctatgacaagatacttttaccatggccgaacagagactgtgcgatcttgtacagtggaggccgtcaggtggtgccagtccatgcaggatccttctgccagtctccttgaacgtcagcaaaagatgttagacgcttttgcaaagcataacaagatgatgagagattgttcccatggaaaaggatttgaccgtcaccttttaggccttttgctcatagcaaaagaggaaggcctccctgttccagaactgtttgaggatccacttttctccagaagtggaggaggtgggaattttgtgctgtcaacaagtctggttggttacttacgaattcagggagtcgtggttcccatggtacataatggatacggctttttctaccacatcagagatgacaggtttgtggtgacatgttcatcctggaggtcatgtcttgagactgatgcagaaaagttagtggagatgatttttcatgctttccacgatatgatacatctgatgaacacggctcatctttagagactcagagacatacaggtcacagaaactgggtacggagaatgggatggtgatacgacatggaaggaatgttgacttaaaggaaacctgttaatgcagggattagagagggatgcactctagatttattctaccttaaagccttctgttgcaacagcaatgcaaactcagacatagtgaatagaactatgcaatgttttaagcctcaacaatgcacatctgtatattttaacaatacaaatcctactctaatgttaaaatatttttgttggcacatgtgtaggttgcaagtcctctgtgaacataattatagagtatttctcaagcactttaatactttctaatggccagagggtataaaacccatggttagatgctaatttccctgacatcagtgccttctacatccagcacaggagtacaagcctatgagatttcatgggaaaaccactattgttcaatattgatctaaaatagctcctttgaacagacaaaagtatcaagttgtattagaaaagaatattagcaaaactcattatgatatgttgtaattaattttgtgaatataaaatcaaaacacttccatttaaatctacttggtagagttagtggctttaaagggttaaatgtcgagtatgattctcagaactttataattatttcccactgttattcaaaatgttagcatatagacattctcccattgtaattcagtgtttatattctcaaagaataaagcatccagaatccttgtaatttctcatttattttcaataaaaatgattcctgat

SEQ ID NO: 3723 - DNA, 2075 bp, Rattus norvegicus
  Genbank Accession No. NM_032057
cgttacctccggaagagccgaagaaccgatccctcggacgccagcggttgagcatcgattgcggtgcgctcgcgcgaaataatggcagacccttggcaggagtgcatggattatgcagtgatcctcgcaagacaagctggagagatgattcgtgaagctctaaaaaataagatggatgtcatgattaaaagttctccagccgacttggtaacagttactgaccaaaaagttgaaaagatgcttatgtcttctataaaggaaaaatacccatatcacagtttcattggtgaagaatctgtggcatccggggaaaagacagtcttcacagagcagcccacgtggatcattgatcccattgacgggacgaccaactttgtgcaccggtttccctttgtagctgtttcgattggcttcgttgtaaataaagagatggagtttggagttgtatacagctgtgtggaagataagatgtatacgggcaggaaaggaaaaggcgccttttgtaacggtcagaagcttcgggtctcgcagcaggaagacattaccaaatcactcttggtgaccgagctgggctcgtccagaaagccggagactttgcggattgttctctccaacatggaaaggctttgctccattcctatccatggaatccggagtgttgggacagcggctgttaatatgtgccttgtggcaacgggaggagcggatgcctattacgagatggggatccactgctgggacatggctggagctggcatcatcgtcatagaggctggcggagtgctgctggatgtgacaggtggaccattcgatttgatgtctcggagaataattgctgcaagtaatatagcattagcagaaagaatagccaaagaacttgagataatacctttacaacgagacgacgaaagttaggcacgtagaaccgcatccagctccgtcacacctgctctccctgggatgtttaaagatgtatgatgtcactgatttaaatttaactttgcagtcctgatttttaagcgggaacttttttttacagatgacatgttcaaaagtagatggaatatttgattattgaaagaaaatttgcatgtaataatatccttggggaaaatatacaggaagtataattaatgaactagccattgaaatagtccccagcccatatgatccctttcaacttaatttactatttatatgcacagttcttaactagaaagttttcttttttgtaagcggttttctctttgttccaaaagccatatttgattaagtctgtaaggctgtaaccagcaggctctccctgtgcagaaggccttcgtgttttattaatcactgtaatacagcacctagtgcagaaccagtcagacagtaggcgatctccaatcgacacctcacactgagtgcttgaagctgcaattcctgcttctaatgtgtcagaataagataaccattctactgtggcttcctgttttgaagtaaaagtttcctcactgtccttttacatttcatattgttgtgccatttcatagggccaccctgccagaggccattgcttctagttggcatttctgcagttagtatactgctgtgtgttgtaggttctgtttggagcccccacgctagagagaaatttccacagacgtcttccatgtacctggtgcagttagtggcagtgtgacgttttaggaaatgcagtatcacattcagatccataccgtggtgttggctggtgtgaactgtgtattgtggcgttcatggtgaactttttgatttctttcaaaacttgctgaatttcaccactgctctctttggctattctataaggtcttgggcctctcaaacacaagaaaatgcaatgactcctattccttttcaaaggattaattcattgtccagccttggcgcttggcataggagcagactttgttcttagtatgtttgaaccttgcgttggataaaatgaagtgttcttgtaaagttccaaggcagttattaccttgttgttggacgatttgatatattaaatctatatgatactccgaaaaaaaaaaaaaaaaaaaaaaaaaaaaaaa

SEQ ID NO: 3724 - DNA, 1474 bp, Rattus norvegicus
  Genbank Accession No. NM_032058
tggctggcagttgaggcttctgcaagtccagggactgtagtggagatgccgggtgccgcggcgaagggctcggagttgtccgagaggatcgagagcttcgtggaaactctgaagcgaggtggcgggcggcgcacgtcggaggacatggctcgggagaccctggggctgctgcgccggctcatcacggaccaccactggaacaacgccggggacctaatggatttgatccgcagagagggtaggaggatgacagccgctcaccctcctgagaccaccgtgggaaacatggtgcggagagtcctcaaaatcatacgggaggagtatggcagactgcatgggcgcagtgatgagagcgatcagcaggagtccctgcacaaactcttgacatccggaggcctgagcgaggatttcagcttccattatgccccacttaagtccaacatcattgaggcgattaatgagctgctagtggaactggaaggcacaacggagaacattgcagcccaagctctggagcacatccactccaacgaggtgatcatgaccattggcttctctaggacagtcgaggctttccttagagaggcagcccagaagaggaagttccatgtcattgctgcagagtgtgctcctttctgccagggacatgaaatggccgtcaatttgtccgaagcaggtatcgagacaactgtcatgaccgatgctgccatttttgctgttatgtcaagagtcaacaaggtgatcattggtacgaagactatcctggccaatggttccctgagggctgtggcaggaactcacactctggcactggcagccaaacaccactccacgcctctcatcgtctgcgcacccatgttcaagctctctcctcagttccccagtgaagaagattcatttcacaagtttgtggctcctgaagaagtccttcctttcacagaaggagacattctggagaaggtcagtgtccactgtcctgtgtttgactacgtgccccctgacctcattaccctctttatctccaacattggtgggaatgcaccgtcctacgtctaccgcctgatgagcgagctctaccatcctgacgaccatgtcctctgacacggcctgtcctatgcggaaccagcttagacccggagtggagtggagacacagtgttgctgctgcagtggggactggagagtcagcctgaaccctcagtgcctgtcacctgccttcctactcatgcccagtgaggagtggtccaggactgctcctgccttctgggcttatctgagcagcaggccttgcttccctggcattttggggccactttgtgactaggctgtgtttgtttcaggaacttcaacctcctggctctgtggtgtgttacacatacataccataactacttttgctgggtcggtgtttgctcagaaatgccttccagaccttttcctaatctgtgtcaataaaagctactggaagctcaaaa

SEQ ID NO: 3725 - DNA, 1830 bp, Rattus norvegicus
  Genbank Accession No. NM_032066
tggcgagttatggagcgcgctctcccggcggccggcttcctatactgggtgggcgcgagcaccattgcttacctgaccctgcgagcctcgtactcgctcttcagggccttccaggtgtggtgcgtgggcaaccaggcctttgtcggcccgcggctcggagaatgggcagttgttacaggtggcactgatggaattggaaaatcatatgcagaagagttagcaaagcgtggaatgaagattgtcttgataagcagatcccaggataaactgaaggaagtttccaacaacatcaaagaaaaattcaacgttgaaacaaggaccattgctgtcgacttttcattggatgatatttatgataaaattaagacaggcctgtctggtcttgaaattggcgttttagtgaacaacgtgggcatgtcatacgagtatccagaatactttttggaaattcctgacttggacaacaccatcaagaaactgataaatattaatgtgctttccatttgcaaggtgacacgcttggtgctgcctggcatggtagagagatctaaaggggtgattctcaacatctcctctgccagtggcatgctcccggttccactgttgacagtctactctgcaaccaaggcctttgtagatttcttctctcagtgcctccatgaggagtataagagcaagggcatctttgtgcagagtgtcctgccattctttgtatctacaaaactggcaaaaatacggaagccgactttggataagccctctgcagagacatttgtgaagtctgcaattaaaacagtaggtctgcagacccgaaccactgggatatgtgatccacgccatcatgggctcaataaactcaatcttgccccgttggatttattttaaaacgatcatgggtttcaacaagtctttgcggaatcgctatctgaagaaaaccaagaagaactaagttctgctgggtcatcgagctccttggccagacgcttgacctgtgcttgcatactgggcccctgcctgtccccagagtctctactgtcatctcagtaattactaacatggcatagctggcggaaagcaaattccttttagaggttcctaacatatattctggatacaaccaggagtaatttgaagtttaatataaatgttcttggcaaatgtatgtataccactttgacagaaaggaacagatcccagaatgacagacgtagcacccatccggcccagaatgccaatgattacctaatatttggtctggaacctactataaagtgtaatagctagctacttttttatttttaacattaaagggaatggggcttagttgattttttttttatgggcagatacaatgcagtttacattgatttctgtaaggttttctaaaggtatgttccagcttatgtgtttctatggaactggtcttcttaaaagtagctaagaaagacataaagagaattgaaacacggagttctttctaacacagaagtccacaaaatgttattcttggaacacacattatgtctgctctgttccatgtatgtaaatactgaatgctatatagtgtgactgaaatgtaaaggtaagtgggcccaagtgtacatcaagaccagcaacatcctgtggtactgtgggatccagaagagcagcctgcctggatatccagtgttggtcatgtctgtactgcacccatactatttgcctaggatgacagactccttctgtggtagtgaggggtcatggaaacatgttctttttaagttggtgtctcatttgaattcatatatccacttttaataaaagatgatgtaaccgcaaaaaaaaaaaaaa

SEQ ID NO: 3726 - DNA, 3622 bp, Rattus norvegicus
  Genbank Accession No. NM_032067
cagcgtgagtgcgaggcggaggcggcggctgcagcggagcggacggtcgctcggcggcaggcactggtgtaatggataggtaacagaagaccacttcccttcctcctcagggcttcagcatgactgagtgcttcctgccccccaccagcagccctagtgaacaccgcagggccgagcacggcagcgggctgacccggacccccagctccgaggagatcagccctacaaaatttcctggattgtaccggacgggtgagccttcacctccccatgacatcctccacgagcctcctgatatcgtgtcagatgatgagaaagaccatggaaagaaaaaaggaaaatttaagaaaaaggagaaaaggactgaaggctacgctgccttccaggaagacagctctggagatgaggctgaaagtccttccaagatgaagaggtccaagggcatccatgtgttcaaaaagcccagcttctctaaaaagaaggaaaaggattttaaaatcaaagaaaagcccaaagaagaaaagcacaaagaagaaaagcataaagaggaaaagcataaagaaaagaaatgtaaagacttgacggccgccgatgttgttaaacagtggaaggaaaagaagaaaaagaagaagccaactcaggagccagaggtgcctcagacggacgccccgagtctcagacccattttcggcgctcccttggctgacgcagtagagaggaccatgatgtacgacggcatccggctgccagctgtcttccgggagtgcgtggactacatggagaagcacggcatgaaatgtgaaggcatctaccgagtgtcaggaatcaaatcaaaggtagatgagctgaaagcagcctatgaccgagaggagtctccaaacttggaagaatatgaacctaacactgtagccagcttgctgaagcagtatctgcgagaccttcccgagaatttgcttaccaaagagcttatgccccgatttgaagaggcttgtgggaggaccacagaggtggagaaagtgcaggagttccagcgcttgctcagggaactgccggagtacaaccatcttctgctctcctggctcattgtgcacatggaccacgtcatcgcgaaggagctggaaaccaagatgaacatccagaacatctccatagtgctgagcccaaccgtccagatcagcaaccgggtcctgtatgtgcttttcacacacgtgcaagagctctttggcaccgtggtcctgaagcaagtaacgagacctctgcgttggtccaacatggccacaatgcctacactgccagagacccaagcaggcatcaaggaagaaatcaggagacaggagttccttttgaactgtttacatcgagatctgcagggcgggataaaggacttgtctaaagaagaaagattatgggaagtacagaggattctgactgccctcaagagaaagctgagggaagctaaaagacaagagtgtgagaccaagattgcacaggagatagccagcctttcgaaggaggatgtttccaaagaagaaacgaacgaaaacgaggaggtcataaatatcctccttgcccaggagaatgagatcctgactgagcaggaggagctcctggccatggagcagtttctgcgtcgtcagatcgcctcggagaaagaagagattgaccccctccgagctgagattgcggagatccagagtcgccagcatggccgcagcgagacagaggagtactcctctgacagcgagagcgagagcgaggatgaggaggagctgcagatcattctggaagacttacagaggcagaatgaagagttagaaataaagaacaatcacttgaaccaggcagtccatgaagagcgggaggccatcgttgagctccgagtgcagctccggctgctccagatgctgcgagccaagtctgagcagcagctccaggaggaggaggagcccgagaggcgagggggcacaggcccactaccctgtgaaggtgtcctcgaggtgagagcagccaaggagcaggcgaagcctcgcccagcaaagaccggaaggagacgcccatctgaactgccccggccctgtgcatcgtactgtaagcgagagtccgctgcctgtcctgccaggcagcgttctgtgaaggctctcagagacgctcgctcttgcacacgtctgactccgtgtcaggctcaggtcctgggagagtgaaggggtggacactcgggggtggggggcttgcagggaacacaggtatttccagatagtgtcagcttatttgaaaattaattttctttgttaaaaataactattttaacccttgagtggcttctttttaaaccaaaaaactttttgcttttttttgttgttgtttaaatcacagcagaatcaggatctctttcttatcaaagggtgggaaccaaaccaggtcacttctgcgcctgccttgtggacgctcgtggtctcaccagccctgcagggtccctggccactcttgcttgtgccttccacaccttttggtgcagattgttcagtggggagctgcctcatattctctgactggccaaaaaggctctcgctggggttccctgtacctgccctgtgtgtaccactttgcttttccagctccgggtctgtcagtgtgagtcaggacggcccagtttggttgcagacggaggttaccatgcagcctgccaccagcctgggcagggcaggccacccactcactgccagggagcagcaagggcctcttctcagaggtggtcagagatgaccaccttgaccctgaggttgcacaggacacttctcacaccagggtccttttccacactgaccttccaggaaagtcaccttccacagtgacttcagttgctagcttgggctgggatacccacacctctgccaggataagccatgtagatgctgtcatgcacaactttcacctgtccatgtcatctcaaggggctgcttaaggactctgacagaactgagcggaaggaaggaaagcgtaactgtaattgaccccccctggtgtttgcctctaacctggacgactgctcccagcggtctgggaggccggactcttaggcaaccggatttcactgtcagatgagtggcccccagggaggtccccctgtggctctgaagacaaatcccacactctaaagtgagcgacaaacccacaggagggctccggtctactcctagttagtatttatttcagcacctgttggtgcgatttttcgttagcctctacctattgcactgttgtgacttgttggccattatttgatttttgtacggaaaaaaaagctttgttatagaaatcagcatactatttttttaaatctggagagaagatattatggaaactggaaacgtggtcaggtgtcaaatgtaaatgtataaatgccttgctgcacccgtcagatgtgcaacactcattctatatttgctggcaatattgaggaattctttttgtttgtgtaaactctaatttctatcaaggtatcatgggtttttaaaatttcattacaaatgtctcaatgttggttaactaatttttgccaggaccattattgattaaggaaataaactcagcagccatttgagaaaaaaaaaaaaaaaaaaaa

SEQ ID NO: 3727 - DNA, 1518 bp, Rattus norvegicus
  Genbank Accession No. NM_032079
gtcgcgctccttccgctccgccgcctgcttgcgagtgctgccgggcaggccgccatggcgaacgtggccgacacgaagctgtacgacatcctgggcgtccctcccggcgccagcgagaacgagctgaagaaggcataccgaaagttagccaaagaataccatcctgataagaatccaaatgctggagataaatttaaagaaataagttttgcctatgaagtattgtcaaatccagagaagcgggagctatatgacagatatggagaacaaggtctacgggaaggcagcggcgggggtggcggcatggatgatattttctcacatatttttggtggaggattgtttggcttcatgggcaatcaaagtagaagtcgaaatggcagaagaagaggcgaggacatgatgcatccgctgaaagtgtctttagaagacctgtacaatggcaagaccaccaagctgcagctcagcaagaatgtgctctgtagcgcgtgcagtggccaaggtggaaagtctggagctgttcagaaatgcagtgcttgccggggtcgaggtgtgcgcattatgataagacagctggctccagggatggtacagcagatgcagtctgtgtgctctgactgtaatggagaaggagaggtcatcaatgaaaaagaccgctgtaaaaaatgtgaaggaaagaaggtgattaaagaagtcaagattctggaagttcatgtagacaaaggcatgaaacatggacagagaattacgttcactggggaagcagaccaggctccaggagtggaacctggagatattgttcttttcgtacaggaaaaagaacatgaggtgttccagagagatgggaatgatctgcatatgacatataagataggacttgttgaagctttgtgtggatttcagttcacatttaaacatcttgatgctcgtcagattgtagtgaaatacccccctggcaaagtaattgaaccaggatgtgttcgtgttgttcgaggcgaaggaatgccacagtatcgtaatccctttgaaaagggtgatctttacataaagtttgatgtgcagtttcctgaaaacaactggatcaacccagacaaactttctgaattagaagatctcctgccatctagaccagaagttcctaatgtaattggggagacagaagaagtagagcttcaggaattcgatagcactcgaggctctggaggtggtcagaggcgtgaagcctacaacgacagctctgatgaggaaagcagcagccatcatggacctggagtgcagtgtgcccatcagtaaactgcaggcaactgcacggtggattttctccacatttgccggatttgccagctgctggagtacctggatgagtccagatgaactgatggacatctgctgatctatgtgtaacttctaaacttggtatagtatcacagagtgtataatttaaactaaccacggagctttacgtcttcatttcgactgtctatagcagagtaaagcacttgaaataagactcccttt

SEQ ID NO: 3728 - DNA, 1889 bp, Rattus norvegicus
  Genbank Accession No. NM_032416
gctttatctgctaagctccgctcagttcagcatgctgcgcgccgcactcagcaccgcccgccgtgggccacgcctgagccgcctgctgtccgccgccgccaccagcgcggtgccagcccccaaccagcagcccgaggtcttctgcaaccagatcttcattaacaatgagtggcatgatgctgtcagcaagaaaacattccccaccgtcaacccttccacgggggaggtcatctgccaggtagccgaagggaacaaggaggacgtagacaaggcagtgaaggccgctcaggcagccttccagctgggctcgccctggcgccgcatggatgcatctgacaggggccggctgttgtaccgattggctgatctcatcgaacgggaccggacctacctggcggccttggagaccctggacaacggcaagccttatgtcatctcctacctggtggatttggacatggttctgaaatgtctccgctattatgctggctgggctgacaagtaccacgggaaaaccattcccatcgatggcgacttcttcagctacacccgccacgagcctgtgggcgtgtgtggacagatcattccgtggaacttcccgctcctgatgcaagcctggaagctgggccctgccttggcaactggaaacgtggtggtgatgaaagtggccgagcagacaccgctcactgcactctacgtggccaacttgatcaaggaggcaggcttcccccctggtgtggtcaatattgttcctggattcggccctaccgccggggctgccatcgcgtcccacgaggatgtggacaaagtggccttcacaggttccactgaggttggtcacctaatccaggttgccgccgggagcagcaatctcaagagagtaaccctggaactggggggaaagagccccaatatcatcatgtcagacgctgacatggactgggctgtggaacaggcccactttgccctgttcttcaaccagggccagtgctgttgtgcgggctcccggaccttcgtgcaggaggatgtgtatgatgaattcgtggaacgcagtgtggcccgggccaagtctcgggtggtcgggaaccctttcgacagccggacggagcaggggccgcaggtggatgagactcagtttaagaagatcctgggctatatcaagtcaggacaacaagaaggggcgaagctgctgtgcggtgggggcgccgccgcagaccgtggttacttcatccagcccaccgtgttcggagacgtcaaagatggcatgaccatcgccaaggaggagatcttcggaccagtgatgcagatcctcaaattcaagaccattgaggaggttgtggggcgagccaataattccaagtacgggctggctgccgctgtcttcacaaaggacctggacaaggccaattacctgtcccaagctctgcaggctgggactgtgtggatcaactgctacgatgtgtttggggcccagtccccatttggtggctataagatgtcggggagcggcagggagctgggcgagtatggcctgcaggcctacacggaagtgaagacggtcaccgtcaaagtgccacagaagaactcgtaaagtggcgtgcaggcttcctcagccagcgcccaaaaacccaacaagatcctgagaaaagccaccaccaagcacactgcgcctgccaagagaaaaccccttcaccaaagcgtcttgggccaagaaagtcaggatttgataaacagggcagggttggtgggcggtgtgtggggagcatcccagtaaactggggaagggaggagctctgtgcagactaccacgcgcacgcacacacgctcactgggtccttctgtgctggatgctggttccaccctcagtgcttaaacaaatgagcaataaa

SEQ ID NO: 3729 - DNA, 792 bp, Rattus norvegicus
  Genbank Accession No. NM_032613
atgaaccctaactgtgcccggtgcggcaaaatcgtgtaccccacggagaaggtgaactgtctggataagttctggcataaagcatgctttcactgcgagacctgcaagatgactttgaacatgaagaactacaagggttacgagaagaagccttactgcaatgcacactaccccaagcagtccttcaccatggtggccgacactccggagaacctccgcctgaagcaacagagcgagctgcagagtcaggtgcgttacaaggaggagtttgagaagaacaagggcaaaggcttcagtgtggtggcagacacgcctgaactgcagagaatcaagaagacccaggaccagatcagcaatatcaaataccatgaggagtttgagaagagccgcatggggcccagcggaggtgaaggcatagagccagagcgccgagaagcccaggacagcagcagctaccggaggcccacggagcagcaacagccacagccccaccatatcccgaccagtgccccagtttaccagcagccccaacagcagcaggtgaccccgtcctatggtgggtacaaggagccagcagcccctgtctccatacagcgcagtgccccaggtggcggcgggaaacggtaccgtgcagtgtatgactacagcgctgccgacgaggacgaggtctccttccaggatggggacaccatcgtcaatgtgcagcagatcgatgatggctggatgtatgggaccgtagagcgcaccggtgacacggggatgctgccagccaactacgtggaggccatctga

SEQ ID NO: 3730 - DNA, 1089 bp, Rattus norvegicus
  Genbank Accession No. NM_032614
gcggccgctccagcatggcggcgggggcggctgaagcagccgaggcggccgtggcagtggtggaagtcggctctgcccggcagtttgaggagctactgcgcctcaaaaccaagtcactccttgtggtccatttctgggcgccatgggctccacagtgtgtacagatgaacgatgtcatggcagagttagctaaagagcatcctcatgtttcatttgtgaagctggaagccgaagctgttcctgaagtatctgaaaaatatgaaattagttctgttcccaccttcctgttcttcatgaagggaacacctcaggaaccacgctgtggttttagcaagcagatggtggaaatccttcacaaacacaatattcagttcagcagttttgatatcttctcagatgaagaagttcgacaggggctcaaaacatactctaattggcccacctatcctcagctctatgtttctggagagctcataggaggacttgacataattaaggagctggaagcatcagaagaactagatacaatttgtcccaaagcacccaagttagaggaaaggctcaaagtgctgaccaataaagcttctgtgatgctctttatgaaaggaaacaaacaggaagcaaaatgtggattcagcaaacaaattctggaaatactgaatagtactggggttgaatatgagacttttgatatactggaggatgaagaagtgcgtcagggattaaaaacgttctcaaattggccaacctaccctcagctgtatgtgagaggggatcttgttggaggactggatattgtcaaggaactgaaagacaacggtgaattgctacctatactgaagggagaaaattagtgaacgttaagcacggtgtccaaggactgcaagaagtatttaattatcgtggaatagttgatggcttggtcctgcgaagtggactgagagtagaaatgcgacatagtcagctgtgctcaatgtgcttcacaaagttgtgctgaaaaaaacatatgttacattttccatgaagcatagaaggcaataaactccagattcagctaaaaacgaaaaacaaaaaaaaaaaaaaaaaaaa

SEQ ID NO: 3731 - DNA, 1203 bp, Rattus norvegicus
  Genbank Accession No. NM_032615
aggtccggggctccggtccgtgccggtgcaggcgccggcatgtggctgtgggaggaccagggcggcctcctgggccccttctctttcgtgctggtgctgctgctggtggtgacgcgcagccccttcaacgcctgtgtgctcactggcagcctctacctcctgctgcggttcttcagcttcgagccggtgccgtcccgccgggccctgcaggtgctcaagccccgtgaccgcgtgtccgccatcgcccatcgcggcggcagccacgacgcgcccgagaacacgctggcggccatccggcaggcagctaagaatggagcaacaggtgtggagctggacatcgagtttacttctgatggagttcctgtcttgatgcacgataacacagtagataggacaacagacgggtctggccgattatgtgatctgacatttgaacaagttaggaaacttaatcctgcagcaaatcacagactcagaaatgagttccctgacgaaaggatccccaccctgagggaagcagttacagagtgcctctgccataacctcaccatcttcttcgatgtcaaaggccatgcagatatggcttctgctgctctaaagaatatatacatggaatttccccagctgtacaacaacagtatggtctgctcattcttgccggaagtcatctataaaatgagacaaacagatcagaaggtaatcacagccctgactcacaggccttggagcctgagccacactggagacgggaagcctcgctacagcgtcttttggaagcagtctgtgtttgtggtgttggacatcttgcttgactggagcatgcacaatgtcttgtggtacctgtgtgggatttcagccttcctcatgcagaaggattttgtctccccggactatttgaagaagtggtcagccaaaggaatccaggttgttagttggactgtcaatacctttgatgaaaagaattactacgagtcccaccttgggtccagctacatcactgacagcatgctggaaaactgtgcacctcacttctagactccccaggaggaaacacagatgcaaaactgcctggaggccttttgcagggacacgagaacactctgttagcacaagccctgggaatcctgcggctcatactagcaatagccacagttttaccccaagcagaaaccaggcatggcgaccatgctccaaggaaggctc

SEQ ID NO: 3732 - DNA, 4422 bp, Rattus norvegicus
  Genbank Accession No. NM_033021
gatcctgggagagtccgacgttcgccggctaacgcaggacaggtcactgaggtccgccaggtgtgtccgccgtttgtttcctgcccctcgccaggttcggtgtccgctgccgaggcccgaggcccttcttccgctgtcggcgcgcccccctgtctcgtttcggccccgccgggacaacgcctggagtcgcagcagccgggtgatcgcgcccgtcatcctctaccaacgtttccaggctgccctgctcgggagtgggtgagaatgaagctaaaggagatagaccgcacagcgatgcaggcgtggagccctgcccagaaccaccccatttacctggccacagggacatctgctcagcagttggacgcgacattcagtaccaacgcttcccttgagatattcgagctcgacctttccgacccgtccttggatatgaagtcctgtgctactttctcctcgtctcacaggtaccacaagttgatttggggacctcataaaatggattccaaaggagatgtttctggagttttgattgcaggtggagaaaatggaaacattattctctacgatccttctaaaattatagctggagacaaggaagttgtgattgcccaaaaggacaagcatactgggccagtgagagccttggatgtaaacatcttccagaccaatttggtggcctctggtgctaatgaatctgaaatctacatttgggatctaaacaattttgcaactccaatgacgccaggagctaaaacacagccaccagaagatatcagctgcatagcctggaacagacaggtccagcatatcttagcatcagccagtcccagtggccgggcaacggtctgggatctcaggaaaaacgagcctattatcaaagtcagcaaccacagtaactggatgcactgctctgggctggcatggcaccctgatgtcgctactcagatggtccttgcttctgaggatgatcgattaccagtggtccagatgtgggatcttcgatttgcttcctctcccctccgggttctggaaaatcatgccagggggattttggcaattgcttggagcatggcagatcctgaattgttgttaagctgtggaaaagatgctaagattctctgctctaaccctaacacgggagaggtattatatgaacttcccaccaacacacagtggtgctttgatatccagtggtgtcctcggaatcctgccgtcctgtctgccgcttccttcgatggtcgcatccgtgtctactccatcatgggagggagcatagacggcttaaggcagaaacaagttgacaagctttcgtcgtcttttgggaatcttgatccgtttggcacaggacagccgctccctccattacaaatcccacagcagacttcacagcacagcatcgtgctgcccctgaagaagccgcccaagtggatccggagacctgtgggcgcctccttctcattcggagggaagttggtgactttcgagaacgttacagggcagcctcagcagggagctgagcagccacggcggcagcccgtgttcatcagtcaggtggtgacagaaaaggacttcctcagccgctcagagcagctacagcacgtcgtcgagtctcagggctttatcagttactgccagaaaaagatcgatgcgtcccagactgacttcgagaagaatgtgtggtccttcttgaaggtaaagtttgaggaggattctcgtgggaaataccttgagcttcttggatatagaagagaagatctgggagagaagattgctttggccttgaacagagtggacggatccgatgtggctcttaaggactctgaccgcgtagcgcagagtgatggggaggagagccctgccgaggaagggcagctcctgggagagcgcattaaagaggaaaaacaggagtgtgactttctgccctcggctggcggtgggacctttaacatctccgtcagtggggatattgatggtttaattacccgggctttgctgaccggcaattttgagagcgcagttgacctttgtttacacgataaccgaatggctgatgccatcatattagccatcgcaggtgggcaggagctcttggctcaaacgcagaagaaatactttgcaaaatcccaaagcaagattaccaggcttatcactgcggtggtgatgaagaactggaaggagattgttgaatcctgtgatcttaaaaattggagagaggctttagctgcggtcctcacttatgctaagccagatgagttctccgccctgtgtgatctcttgggagccaggcttgaaagtgaaggagacagcctcctgcggactcaggcctgcctctgctatatctgtgccgggaatgtagagagattagttgcttgttggaccaaagctcaagatggtagcaaccccttgtctctccaggatctgattgagaaagttgtcatcctccgaaaagctgtacagctcacgcaagccctggacacgaacactgtcggggctcttctggccgagaagatgagtcagtatgccaacttgttggcagcccagggcagcattgccgcggccttggcgtttctgcctgacaacaccaaccagccagatatcgtgcagctgcgtgacagactctgcagagctcaaggcaggtctgtgccggggcaggagtcctctaggagctcctacgaggggcagccgctgcccaagggcgggcccgggccgtttgctggtcacccgcaggtgtccagagttcaaagtcagcaatattatccccaggttagaattgcccctactgtcactacctggagtgacagaactcccactgccctccccagccatccacctgcagcctgtccctctgacacacagggagggaatcctccacctccaggtttcataatgcatggcaacgttgttccaaatagccctgccccactgccgacgtctccaggccacatgcacagccagccaccaccttatccgcagccgcagccttaccagccagcccagcagtattccttgggaacaggggggtcagcagtttatcgacctcaacagcctgttgctcctcctgcttctaagcgttaccctaacgccccatacgtatctcctgtcgcttcctactccgggcagcctcatatgtacacagcacagccagcctcctcccctacctccagctctgctcctcttccccctcccccttcctctggagcgtccttccagcatggcggaccaggagctccaccgtcatcttcagcttatgcactgcctcctggaacaacaggtacaccgcctgctgccagtgagctgcctgcgtcccagagaacaggtcctcagaatggttggaatgatcctcccgctttgaacagagtaccgaagaagaagaagctgcctgagaacttcatgcctcctgtccccattacgtcaccaatcatgaaccctgggggagatccccagccacaggggctgcagcaacagccttcagcttcagggccacggtcaagccacgcctccttcccgcagccgcacctagccggcggccagcccttccacgggatccagcagcctcttgctcaaacaggcatgccaccgtctttctcgaagcccaacactgaaggggcccccggcgctcccattgggaacaccatccagcatgtgcaggctctgccaacagaaaaaattaccaagaagcctattccagacgagcacctcattctaaagactacgtttgaggaccttatccagcgctgcctctcctcagctacagacccccaaaccaagaggaagctggacgacgccagcaaacgcctggagtgtctgtacgacaaacttagggaccagacactttctccaacaatcatcagcggtctccacagcattgcgaggagcattgagacgaggaactactctgaagggttgaccgtccacactcacatcgtcagcaccagcaacttcagtgagacctcagccttcatgccagtcctcaaggttgtgctcagccaggccagtaagctgggcgtctgagacagctgccatgacctccgactccgccacttctccaaagaaagccatgctaagactgggaccagcccctcattagcatgtttccatggcacccgccacccaggagctttgacatttctgcaggcaaactcccctagaactgcttgaaccccccctcccaccccgcccgtgctttcctttgttttaatcccctcgcccattatgattttcccattctgcaaatagtgtctttcctggattacacatagtgtggtttcctgagggattctgacaaaatgtggtttttaaaacttgggtgtactttttaggaaaattgcatctggctgtgtataaaacagacctaaaatagatttctttaatgtcttccctaccttcttcacgttcatcagattaaagttgtaatcccatctt

SEQ ID NO: 3733 - DNA, 3257 bp, Rattus norvegicus
  Genbank Accession No. NM_033096
ggcacgagcgctgctcaatggcggaaaagccgctggtactctgaccgcctggtcccccctggcagttgcgggggagtttcctgccggcgcggctggagtctctgtttctctgtgtccggtggctggaagatgctccagagagatcaggctgcggcggaggaggtggcggcggccgagtcggcagcggcgctgggttggagagaaggcggcggcggcggcgtgaggggccggacggtgtaaacagctcgggcggcggcggtggccgagcccccgagggcgaagcggcggcggaggcggtgtcgcgtctcgggagaaagccgggggccgcgggcggctgtgcggcgggcaagcccgcgagaccttgccttccaccttcgccccagattcgttactaaacatgggtgcatttttggataaacccaaaactgaaaagcacaatgctcacggtgcagggaacggtctgcgttacggtctgagcagtatgcaaggatggagagtagaaatggaagacgcacacactgctgttgtgggaattcctcacggcttggaggactggtcgttttttgcagtctatgatggtcatgctggatcccgagtggcaaattactgttcaacacatctattagaacacatcactaccaatgaagactttagggcagctgacaaatcaggctttgctcttgagccgtcagtggaaaatgttaagactggtatccgaactggctttttgaaaattgatgaatatatgcgtaacttttcagacctgaggaacgggatggacaggagcggctctaccgcagtgggcgtgatgatttcaccgacacacatctactttatcaactgcggtgactcgagagctgttctatgtaggaatggacaagtctgcttttctacccaggatcacaaaccttgtaatccaatggaaaaggagcgcatccaaaatgcaggaggcagtgtaatgatacagcgtgtgaatgggtcgttagcagtgtctcgtgctctgggggactatgattacaagtgtgttgatggcaagggccccacagagcagcttgtttctccagagcctgaggtttatgagattctaagagcagaagaggatgaatttgtcgtcctggcttgtgatgggatctgggatgtgatgagcaatgaggagctctgtgagtttgttaactctaggcttgaggtgtcagacgacctggagaatgtgtgcaattgggtagtggacacttgtttacataagggaagtcgagataacatgagtattgtgttagtttgctttgcaaatgcccccaaggtctcagatgaagccgtgaaaagagatttagagttggacaagcacttggaatcacgggtggaagaaatcatgcagaagtctggagaggaaggaatgcctgatcttgcccatgtgatgcgcattttgtctgcagaaaatatcccaaatttacctcccgggggaggcctcgctggcaagcgcaatgttattgaagctgtttatagtagacttaatccaaacaaagacaatgatgggggcgctggcgatctagaagactcattggtagccttataaccttctaaatgcttttgattctgaaaattgggggaaaacttttaatcatattttcttcaatacaaggggaactattcttgtgaattcccactgttttgtggtatgagcagaagccattagcatttcccaccatttgctcatgtttgtacttcccagtaatcgccactcttagcactgcctggactcaacagtattctcgccagcctcaggcctctgcttacaactgtattgaatttttggccctagaaaaacaaaatgaccctacaaatcaacaagtgtgcctgaggtgcatgggaatatagttagctatactctgaagatacgttaagggtttgtttgtttggttgttttttaaaagcaaaacaaaacaacaacatagaagcatgtaagagtaaaggattgcaagagaagttcagtttttcagtttactaagttggaagcctttcgttagttctgtggcttggaatttcatttgagcaatatactataggatatgtatttattattaattgttatttaatttttttccaatttacttgtattaccaaattgggttctccaataatgtaacattgccttgcttcaagatccattgtttggcaataatataaacccttaaagatttccgcatgtgtctgctacatcgttcagatcttactagaagatcttttgaaaccaagtgagttaatttaaggctatttataatttgctttgtcatcttactggcttcgcattattttaattgatgagatttacctttataatgtaaattgtaatcttcttgttttacatgtggatttctatagttttaattttttcagcttttaagatacaagttttatgtaatttggtataatttttaactgtttatgttattttaaaagctcagaatatcacatcaaaatactataaatacattttaaagtatctattttagatctaaggaaatacagagatattttcatgggttcagtaacctttcattttataacattgggcacggtacagagtggctgtcacatcggtacttaaattatttagttctatttttacaataactttaaattttttaagttttgcatgtattgaatttagtgctgaacatgaagagtaaactatttaccaaaaagaagttcctggagtttggagaagtaacgaatgtatccatctgtacatgatttacatgttgtggatgctttgtaaacatttccccatgttttaattgtgtttcagcaggttgtaattgcctctgtgtgtagctgaacatgagtcattatctggtcctgtatgaaatggaatgtatggtattttctgtatcattttcctgaggctgtgtttggggagccacacattcgaatacagttttcctgatcacttgatttcttgtgcacctgatttttgctctcaaaggaattactgccacaatatattttatttattctttagattttagccttgtcagttgaagtgcttcacatgatggtgttaaaaactacttgtccctttactgggggtttgggggttgttaaaagatggggaggaagaatgcaaatgggtcattgttaacctgtccccactgatcccacctgtactcatagtcccttccaggatggtattctgatgtttcctacaatacggtgaccataggcaacttgttacctgaataaaggatcgattttaaacagcc

SEQ ID NO: 3734 - DNA, 620 bp, Rattus norvegicus
  Genbank Accession No. NM_033234
tgcttctgacatagttgtgttgactcacaaactcagaaacagacaccatggtgcacctgactgatgctgagaaggctgctgttaatggcctgtggggaaaggtgaaccctgatgatgttggtggcgaggccctgggcaggctgctggttgtctacccttggacccagaggtactttgatagctttggggacctgtcctctgcctctgctatcatgggtaaccctaaggtgaaggcccatggcaagaaggtgataaacgccttcaatgatggcctgaaacacttggacaacctcaagggcacctttgctcatctgagtgaactccactgtgacaagctgcatgtggatcctgagaacttcaggctcctgggcaatatgattgtgattgtgttgggccaccacctgggcaaggaattcaccccctgtgcacaggctgccttccagaaggtggtggctggagtggccagtgccctggctcacaagtaccactaaacctcttttcctgctcttgtctttgtgcaatggtcaattgttcccaagagagcatctgtcagttgttgtcaaaatgacaaagacctttgaaaatctgtcctactaataaaaggcatttactttcactgc

SEQ ID NO: 3735 - DNA, 1403 bp, Rattus norvegicus; identical to SEQ ID NO: 2868
  Genbank Accession No. NM_033236

SEQ ID NO: 3736 - DNA, 1552 bp, Rattus norvegicus
  Genbank Accession No. NM_033351
tcagttctgtaattaattaactaacgtggatcaaatgagaaggtgaaagttcacacaggagcactcctgtcgtcttggactgggtctccatcccaccatccagtgccctggtctacgaagagtccacagggaccttgtgaagaatcaacaaggcggggtccagaggagtcacgtgtgccttccactccgggtcgccctgtcaggatggggatgtcccagcccggggtcctcctcagcctcttattggtcctcctgcctcagacctggggagcggagccccgtctcccactgatgtatcatcttgcagctgtgtctgacttatcaacggggcttccctctttctgggccacgggctggctgggtgctcagcaatatctgacctacaacaacctgcggcaggaggctgacccctgtggggcctggatatgggaaaaccaggtgtcttggtattgggagaaggagaccacggatctgaaaagcaaagaacagctcttcttggaggccatcaggaccctggagaaccaaataaatgggaccttcacactgcagggcctgctgggctgtgaactggcccctgataattcttcattgcccacggctgtgtttgccctcaatggtgaggagttcatgcggttcaacccaagaacgggcaactggagtggggagtggccggagacagatatcgttggtaatctgtggatgaagcaacctgaggcggccaggaaggagagcgagttcctgctaacttcttgtcctgagcggctgctaggccacctggagaggggccgtcagaacctggagtggaaggagccgccatctatgcgcctgaaggcccgtcctggcaactctggctcctcagtactgacctgtgctgctttctccttctacccgccggagctcaagtttcgattcctgcgcaatgggctagcctcaggctctgggaattgcagcactggtcccaatggtgatggatctttccatgcatggtcattgctagaggtcaaacgtggagatgaacaccattaccaatgtcaagtggagcatgaggggctggcccagcctctcactgtggacctagattcgcccgccagatcttctgtgcctgtggtcggaatcattcttggtttattgctggtggtagtggccatcgcagggggtgtgctgctatggaacaggatgcgaagtgggctgccagccccatggctttctctcagtggtgatgactctggcgacctattgcctggtgggaacttgcccccggaggctgaacctcaaggtgtaaatgcctttccggccacttcctgatgccaacccaggccccatacccattgcagcctgtggggctgtgtgacctcctgaactgtctctgagcctcccgagggagccctgggctggatgtcctcctcgtggatcccttcttttgtggcctgcttcagtttcccctcttaatgtcaatggctatttccatctccacataaatttgggcccaaatctgtgtgtgcatcgttattctcaggtttcaggcagccggaataaattgaacaagtttgag

SEQ ID NO: 3737 - DNA, 2122 bp, Rattus norvegicus
  Genbank Accession No. NM_033485
caggcggcggcggcgggagtcaggagtcgcggcgtgaggggcgcccccgccggcccctctgggaacatggcgaccggcggctatcggagcagcggcagcaccacggacttcctggaggagtggaaagcgaagcgcgagaagatgcgcgccaagcagaaccccgtgggcccgggttcgagcggcggggatccagccgccaagtcccctgcgggaccgctcgcccagactacggccgcggggacctcggaactcaaccacggccccgccggcgcggccgcacctgccgcccccgggccgggcgccctgaactgcgctcacggctcgtccgcgctgccccgcggggctcccggctcccggcggccggaggacgagtgtcctattgccgctggggccgcgggagcacccgcgtcccggggagacgaggaggagccggatagcgccccggagaagggccgcagctcggggcccagcgccaggaaaggcaaagggcagatcgagaagaggaagctgcgggagaagcgccgctccaccggcgtggtcaacatccccgcggcggagtgcttagatgagtacgaagatgacgaagcaggacagaaggaacggaagcgagaggatgctatcacacagcagaacaccatccagaatgaagctgcgagcctcccagatccaggaacctcctacctgccccaggacccgtcgagaacagtcccaggcagatacaaaagcacaatcagtgccccagaagaagaaatcttaaatagatatccccgaacagatagaagtggcttcagtagacacaacagagataccagtgcgcctgctaacttcgcttcaagtagcaccttggaaaagagaattgaagatcttgagaaggaagtcttgagagaaaggcaagaaaaccttcgacttacgaggctgatgcaagataaagaagaaatgattggaaaactcaaggaagagattgatttgttaaatagagacctcgatgacatggaagacgaaaacgagcaactaaagcaggaaaataaaactcttttgaaagttgttgggcagctgacaaggtagaagacgcaaggctgcctcggtgtgggaaacctgcttttaaaccgcggatgaatgtcatggcgaaggcgcccgtgattcagtgcgctgagagaactgtatatttatttctagaaaacacatggatctcttcttctcaaaatttactctttctcattactagtttttaaaaagtgtaaatccccgtctttcaacatagaagttaacatctttagctattaaaatgataggtgatgcctcttggttctgtgtgatactcagataatatatggttcgaagtagcagccatttgcatatgttttatctatgttagcacatattctccctaaaggaagatgcatagtctttgtttacatgaattcaaatccttgggggagttgcctacagatgccctattactaatgtgtgcgccttccgtgtgctaatgcctactcataaagacgcatctgccgtctcgtcctcccacgggctctcctgattccgagtggtaatagatacactactttgtatagcagtaatcgttcaaaggaaagctattttgcagttatttcatatgttctagttggctaaatataaacttaagaaaatacttgaactgtgttatagtaagtgaaaaattactattttgtgtttgaatattgaaaaaaaatttcagtaacttctgaaaaacagttaatgtatagtttcttatgtaggtactatcattcctttttttttattgctctagggtttactagtaaataatgggatatttaaaaagttgtttattcttcaggcctcaattgtgtacaatttcagtattgaagaagaaaattgatgctgtgaatagcatgtgcttcaaaaatcagaactaaaaaatttttccacacttaaaatatgtacacatacgtcagcatgtgtaagcagagataacacagatatctcagccgattcctgagttggagacaccctgggatgctttttgtcaatagagaatcatcccataaccctaacactgaagattttaaagcaaccatatttgaagatttataaaataaagttgtcttctattaaaaaaaaa

SEQ ID NO: 3738 - DNA, 1404 bp, Rattus norvegicus
  Genbank Accession No. NM_033539
ggatccaaaaatgggaaaggaaaagactcacatcaacatcgtcgtaattggacacgtagattccggcaagtccaccacaaccggccacctgatctacaaatgtggtggaatcgacaaaagaaccattgaaaagtttgagaaggaggctgcggagatgggaaaaggctccttcaagtatgcctgggtcctggacaaactgaaagctgagcgtgagcgtggtatcactattgacatctccctgtggaagtttgagaccagcaagtactatgtgactatcattgatgccccaggacacagagacttcatcaagaacatgattacgggcacatctcaggctgactgcgctgtcctgattgttgctgctggtgttggggaatttgaagctggtatctccaagaacgggcagacccgtgagcatgctcttctggcttacactttgggtgtgaaacagctaattgttggtgtcaacaaaatggattccaccgagccaccatacagtcagaagagatacgaggaaatcgttaaggaagtcagcacctacattaagaaaattggctacaaccctgaccacgtagcatttgtgccaatttctggttggaatggtgacaacatgctggagccaagtgctaatatgccgtggttcaagggatggaaagtcacccgcaaagatggcagtgccagtggcaccacgctgctggaagctttggactgcattctgccgccaactcgtccaactgacaagcctctgcgactgcccctccaggatgtctataaaattggcggcattggcactgtccctgtgggccgagtggaaactggtgttctcaaacctggtatggtggttacctttgctccagtcaatgtaacaactgaagtcaagtctgtggaaatgcaccatgaagctttgagtgaagctctccctggggacaatgtaggcttcaacgtaaagaacgtgtctgtcaaagacgttagacgtggcaatgttgctggggacagcaaaaatgacccaccaatggaagcagctggcttcactgctcaggtgattatcctgaaccatccaggccagatcagtgctggctatgcccctgttctggactgccacacggcccacatagcatgcaagtttgccgagcttaaagagaagatcgatcgtcgttctggtaagaagctggaagatggccccaaattcttgaagtctggtgatgccgccattgttgacatggtccctggcaagcccatgtgtgttgaaagcttctctgactaccctccacttggtcgttttgctgttcgtgacatgaggcagacagttgctgtgggtgtcatcaaagccgtggacaagaaggctgcaggagctggcaaagtcaccaagtctgcccagaaagctcagaaggctaaatgaatatt

SEQ ID NO: 3739 - DNA, 4696 bp, Rattus norvegicus
  Genbank Accession No. NM_052807
tttttttttttttgagaaaagggaatttcgtcccaaataaaaggaatgaagtctggctccggaggagggtccccgacctcgctgtgggggctcgtgtttctctccgccgcgctctcgctctggccgacgagtggagaaatttgtgggcccggcattgacatccgcaacgactatcagcagctgaagcgcctggaaaactgcacggtgatcgagggcttcctccacatcctgctcatctccaaggccgaggactaccgaagctaccgcttccccaagctcacagtcatcaccgagtacttgctgctgtttcgagtggccggcctcgagagcctgggagacctcttcccgaacctcacagtcatccgtggctggaaactcttctacaattacgcactggtcatcttcgagatgaccaatctcaaggatattgggctttataatctgaggaacattactcggggggccatcaggattgagaaaaacgctgacctctgttacctctccaccatagactggtctctcatcttggatgcggtgtccaataactacattgtggggaacaagcccccaaaggaatgtggggacctgtgtccagggaccttggaggagaagcccatgtgtgagaagaccaccatcaacaatgagtacaactaccgctgctggaccacaaatcgctgccagaaaatgtgcccaagtgtgtgtgggaagcgagcctgcaccgagaacaatgagtgctgccacccggagtgcctaggcagctgccacacaccggacgacaacacaacctgcgtggcctgccgacactactactacaaaggcgtgtgcgtgcctgcctgcccgcctggcacctacaggttcgagggctggcgctgtgtggaccgggatttctgcgccaacatccccaacgccgagagcagtgactcagatggcttcgtcatccacgatggcgagtgcatgcaggagtgtccatcaggcttcatccgcaacagcacccagagcatgtactgtatcccctgtgaaggcccctgccccaaggtctgcggcgatgaagaaaagaaaacgaaaaccatcgattctgtgacgtctgcccagatgctccaagggtgcaccattttgaagggcaatctgcttattaacatccggcgaggcaataacattgcctcggaattggagaacttcatggggctcatcgaggtggtgactggctacgtgaagatccgccattcccatgccttggtctccttgtccttcctgaagaaccttcgtctcatcttaggagaggagcagctagaaggaaactactccttctatgtcctggacaaccagaacttgcagcagctgtgggactggaaccaccggaacctgaccgtcaggtcagggaaaatgtacttcgctttcaatcccaagctgtgtgtctctgaaatttaccgaatggaggaggtgacaggaacaaagggacggcagagcaaaggagacataaacaccaggaacaacggagagcgagcttcctgtgaaagtgatgttctccgtttcacctccaccaccacctggaagaaccgcatcatcataacgtggcaccggtaccggccgccggactaccgggatctcatcagtttcacagtctactacaaggaggcaccctttaaaaacgtcacggaatacgacgggcaggatgcctgtggctccaacagctggaacatggtggacgtggacctgcctccgaacaaggagggggagcctggcattttgctgcatgggctgaagccctggacccagtatgcagtctatgtcaaggctgtgaccctcaccatggtggaaaacgaccacatccgtggggccaaaagtgaaatcttgtacattcgcaccaacgcttcagttccttccattcctctagatgtcctctcggcatcaaactcctcctctcagctgatcgtgaagtggaaccccccaactctgcccaatggtaacttgagttactacattgtgaggtggcagcggcagccgcaggatggctatctgttccggcacaactactgctccaaagacaaaatacccatcagaaagtacgccgatggtaccatcgatgtggaggaggtgacagaaaatcccaagacagaagtctgcggtggtgataaagggccgtgctgtgcctgtcctaaaaccgaagctgagaagcaggctgagaaggaggaggctgagtaccgtaaagtctttgagaatttccttcacaactccatctttgtgcccagacctgagaggaggcggagagatgtcctgcaggtggctaacaccaccatgtccagccgaagcaggaacaccacggtagctgacacctacaatatcacagacccggaagagttcgagacagaataccctttctttgagagcagagtggataacaaggagaggactgtcatttccaacctccggcctttcactctgtaccgtatcgatatccacagctgcaaccacgaggctgagaagctgggctgcagcgcctccaactttgtctttgcaagaaccatgccagcagaaggagcagatgacattcctggcccagtgacctgggagccaagacctgaaaactccatctttttaaagtggccagaacccgagaaccccaacggattgattctaatgtatgaaataaaatacggatcgcaagtcgaggatcagcgggaatgtgtgtccagacaggagtacaggaagtatggaggggccaaacttaaccgtctaaacccagggaactatacggcccggattcaggctacctccctctctgggaatgggtcgtggacagatcctgtgttcttctatgtcccagccaaaacaacgtatgagaatttcatgcatctgatcattgctctgccggttgccatcctgctgattgtggggggcctggtaatcatgctgtatgtcttccatagaaagaggaataacagcagattgggcaacggggtgctgtacgcctctgtgaaccccgagtatttcagcgcagctgatgtgtacgtgcctgatgaatgggaggtagctcgggagaagatcaccatgaaccgggagctcggacaagggtccttcgggatggtctatgaaggagtggccaagggcgtggtcaaggacgagcctgaaaccagagtggccatcaagacagtgaatgaggctgcaagtatgcgtgagagaattgagtttctcaacgaggcctcagtgatgaaggagttcaactgtcaccatgtggtccggttgctgggtgtagtatcccaaggccagcccaccctggtcatcatggaactaatgacacgtggcgatctcaaaagttatctccggtctctaaggccagaggtggagaataatctagtcctgattcctccgagcttaagcaagatgatccagatggctggagagattgcagatggcatggcctacctcaatgccaacaagttcgtccacagagacctggctgctcggaactgcatggtagctgaagatttcacagtcaaaattggagattttggtatgacacgagacatctacgagacggactactaccggaaaggcgggaagggcttgctgcctgtgcgctggatgtctcccgagtccctcaaggatggcgtcttcaccactcattccgatgtctggtcctttggggtcgtcctctgggagatcgccactctggctgagcagccgtaccagggcctgtccaacgagcaagttcttcgtttcgtcatggagggcggccttctggacaagccggataactgccccgatatgctgtttgaacttatgcgcatgtgctggcagtacaaccccaagatgcggccctccttcctggagatcatcggaagcatcaaggatgagatggagcccagtttccaggaggtctccttctactacagcgaggagaacaagcctccagagccggaggagctggagatggagctggagctggagcccgagaacatggagagcgtcccgctggacccttcggcctcctcagcctccctgcctctgcctgaaagacactcaggacacaaggctgagaacggccctggcgtgctggttctccgtgccagttttgatgagagacagccttacgctcacatgaatgggggacgcgccaacgagagggccttgcctctgccccagtcctcgacctgctgatcctcgaccccgaagcacgtgcaaacagtaacgtgtgtgtgtgtgtgcgtgcgtgcgtgtgtgctcactcggtgggcggaggggggagcaggttgtaacaatctattcacaagcctcctgtatctcagtggatcttcagaactgcccttgctgcccacgggagtcggcttctctgcagtaaacacacttgggaccttccttttttcaatatgcaagcagctttttttatttccctacccaaacccttaactgacatgggcctctgcaaaccttaatgacagctcttaatagcaacaggacactcgagaattgagtctcctcattctctgccttttctctcttctgccttccctctctctcctctcccttcccacttccaggctctcctctcttttctccgcttcccagtggaaagcccagcggggaagcctttatttattttttttttaaatcaaattgacttaatggctgccctggggctcctcatcacacctgcctgagcaccataggtctttacaaaaaagaaaggaaaaaaacc

SEQ ID NO: 3740 - DNA, 1458 bp, Rattus norvegicus
  Genbank Accession No. NM_052809
gagggtttaggctggtctccggtgacctcctagtcctaaatcttgatacccttgcaagagctttgagcgtgtggggtcccgggcgttcggggtcccgggtgtgtgcggtttgtatagcctgaagccggggtcctccgcgctcgcgtcctccgcagctggactgaagagacgcgtcccagccctgcggggatggaacggaccgagctgctgaagccccggaccctggccgacctcatccgaatcttgcatgagctcttcgccggggacgaagtcaatgtggaggaggtgcaggctgtgctggaagcctacgagagcaatcctgccgagtgggctttgtatgccaaattcgatcaatacaggtatacccgaaaccttgtggatcaaggaaatgggaagtttaatctgatgattctgtgctggggtgaagggcatggcagcagtattcacgatcacacggactcccactgctttttgaagctgctgcaaggaaatctaaaggagacattgtttgactggcctgacaagaaatccaacgagatgatcaagaagtctgaaagaactttgagggaaaatcagtgtgcctacattaatgattctattggcttacatcgagtagagaacgtcagccacacagagcctgctgtgagccttcacttgtacagtccacctttcgatacatgccatgcctttgaccaacgaacagggcataaaaacaaagtcaccatgacattccacagcaaatttggaatcagaactccatttacaacttcaggttcactggagaacaactaagacctgccaagcctttcaaagttttgcttctgggtcgttggaatgttttaccttggataagagaggccacccatcatttgctgtccagttatacattttaataagtccatgctcagtgtgtatactaaggaagcaaaccatcccctgagctatgcaggagaaaaatcccactaaagaaaaagtcacttgatttttaatagccaaatcaccttgctcccagttcttctgtcttctaactccatggaaattctattgggagttctcagtggggttttttttcaaccttaggaaagcacttctggtctctgaactctaataatcaataagtaaaaatgaagaaaccacaagctatcacatgtctgttttcatacctggaagtctaagtgtggaaatctttaatttactttgtatgttcttaatgtttgacaagaatttttttaaatcttggttttcagttttttcaaccctgtttgacaaattcctatgctgtggagactagggatgcagatagcagtttggtgtttggtagtgaacagcagtggggccagaaatgtgcatgtatccagacctcctgcaaataaaaactgaaactcatgtgtaatgtgtgccaccaccttaagctgccaccaaaattgccaaacgactttaataaaactggatttgaga

SEQ ID NO: 3741 - DNA, 1116 bp, Rattus norvegicus
  Genbank Accession No. NM_052981
aatgtaccacaacagtagccagaagcggcactggaccttcgctagcgaggagcaactggcgcgtctgcgggccgacgccaaccgcaaattcaagtgcaaagctgtggctaacgggaaggttcttccaaatgatccgttgtttcttgagcctcatgaagaaatgacactttgcaaatactatgaaaaaagattgttggaattttgttcagtgtttaaaccagctatgccacggtctgttgtgggtacagcttgtatgtatttcaagcgtttttatcttaataactcagtaatggaatatcaccctcggataataatgcttacttgtgcatttttggcctgcaaagtagatgaattcaatgtgtctagtcctcagtttgttgggaaccttcgagagagtcctcttggacaggagaaggcactggaacagattttggaatatgaactactacttatacaacaacttaattttcacctcattgtccacaatccatatagaccatttgaaggcttcctcattgatataaagactcgataccccatgttggagaatccagagattttgaggaaaacggctgatgattttcttagtagaattgcattgacagatgcttatcttttgtacacaccctcacaaattgccctgactgccattttatcaagtgcctctagggctggaattactatggaaagctatttatcagagagtctaagtcgtaaagaaaacagaacttgcctgtcacagctactggatataatgaaaagcatgagaaatctagtaaaaaagtatgagccacccagatctgaagaagttgctattctgaaacagaagttggagcgatgtcattcttctgaccttgcacttaatatggttacaaagaagaggaaaggctacgaagacgatgactatgtatcaaagaaacccaaacaggaagaggaggagtggacggacgatgacctggtagatgctctctaaccagtgtaaatgactgcagcagtacttactgaccgacggaagtaggaagcatgtctgacattttacttttgtcaaaatagtgcaatgtgaaaacatcgaaaatatattaaacttttctaattcttaaaaaaaaaaaaaaaaaa

SEQ ID NO: 3742 - DNA, 1606 bp, Rattus norvegicus
  Genbank Accession No. NM_053019
ggggggggaatctaagactgcgctgggagctcagagagtgggcccccctgcctcaggaccagacagaagtagggacatgtttgaatatcccatttaaaaccactctgcacgcaccggattgcgcacgctagagacggagggagggaaggaaggacagagcgcagagcttagaactcggatcctccggtcctcggtggagaggaggaagcagcccacggggcagggcctcccaggctctgtacggacagcatgagtttcccgcgaggctcccaggatcggtccgtgggcaactccagcccgtggtggcctctaaccaccgagggctccaacggcagtcaggaggcagccaggcttggggaaggtgacagcccgctgggggacgtacgcaatgaggagctggccaaactggaaatcgctgtgctggcagtgatttttgtggtggctgtgctgggcaatagcagtgtgctgctggcgctgcatcgcacgccacgcaagacatcccgcatgcacctctttatccgacacctcagcctggcagacctggcggtcgccttcttccaagtattaccgcagctatgctgggacatcacctccagcttccgcgggccggactggctgtgccgcgtggtgaagcacctgcaggtgtttgccatgttcgcgtctgcctatatgctggtggtgatgacagccgaccgctacatcgccgtgtgccacccgctcaagaccctgcagcagccggcgcgccgctcgcgcctcatgatcgccacctcttgggtgctgagtttcatactaagcacgccacagtactttatattctctgtgatcgaaatcgaggtgaacaatggcactaaaacccaagactgctgggctaccttcatccagccctggggtacccgcgcctacgtgacctggatgaccagcggtgtcttcgtggcacctgtggtcgtcttgggtacatgctatggcttcatctgctaccacatctggcgcaacatccgcggaaagacagcgtcctcgcgacacagcaagggtgacaagggctctggggaggccgtgggtccctttcataaggggcttttggttacaccttgtgtcagcagcgtgaagagcatttcccgcgccaagatccgcactgtgaagatgacctttgtgattgtaagcgcctacatcctttgctgggcgcctttcttcattgtccagatgtggtcagtctgggatgagaatttcatctggaccgattcagaaaacccttccatcacaatcacggcgttgctggcttccttgaacagctgctgcaacccgtggatatacatgtttttcagtggccatctcctgcaagactgcgtccaaagtttcccatgctgccacagcatggcgcagaaattcgccaaggatgactccgatagcatgagccgaaagacagacttcttattctaacaaccggagcccaacgaacagcactgggatgtggaaggactcgcccaaatcttccaaatccatcagattcattcctgtctccacttgagccccacgttcacgcagcccgactcttgggagggacttttgtgtccagctagagatcgtaagagcagatgtgtttatgtgg

SEQ ID NO: 3743 - DNA, 1754 bp, Rattus norvegicus
  Genbank Accession No. NM_053290
cagtgcaagcgcgcaggcgcgaccggggggggggggcgggctgcgaggagaatctcagcgatcctcagttactgccgcatcctctgccggtcgtcatggctgcctacaagctggtgctgatccggcatggcgagagcgcctggaacctggagaaccgcttcagcggctggtacgatgccgacctgagcccagcgggccacgaggaggcgaagcgcggcgggcaggcgttgcgagatgctggctatgagtttgacatcgtcttcacctctgtgcagaagagagcaatccgcaccctctggacagtcctggatgccattgaccagatgtggttgccagtggtacggacctggcgtctcaatgagcgacactatgggggactaacaggtctcaataaagcagagactgctgctaagcatggtgaggcacaggtaaagatctggagacgatcttacgatgtcccgccacctccaatggagcctgatcatcccttctacagcaacatcagcaaggaccgcaggtacgcagaccttactgaggaccagctaccctcctgtgagagcctgaaggatactattgccagggcactgcccttctggaatgaagaaattgttccccagatcaaggaggggaaaggggtcttgattcctgcccatggcaacagctacgggggcattgtcaagcatctggagggtctgtcagaagaggccatcatggagctgaacctgccaactggtatacccatcgtctatgaactggacaagaacttgaagcccatcaagcccatgcagtctctgggagatgaagagacggtgcgtaaagccatggaagctgtggctgctcagggcaaggtgaagaagtgaaggcgaggaggcggactcctgccctgaacaccctctctccctgcttgttcctgcctcctgcaccctcccctgcacctgccacactgactacatctttaggatcttcagtttaagttgtagctgcagataggacctgtggctcccattctccttttagtattttatccccggcacccactccttcatagaatctagtcagaagaagacctctggggctgcaggctcttggtccatatccagggacggctccctgttacaggagagagttgagtagatagtaattatatcccccttagctctttgtttactaagggtctgcttaggaagaaggtcgggagggactgtatgtggtatgaccaatgaggagagaagctgtggtccagttttgtccctggaacctgtcctgcactcttcccacaattaggtaactgggggcctagtcattccagtggagagtgaaatgaacctcatgccgattaaaaagaccctactttctctctgaccctaaaggacgtcgtggccctagaaggttgggaacagtcttgtcaagtctatgtgtgttaacatttatttttacaaaaataaagtatatatacatatatcagcacaaaagcaacgaggttgctagtggcagttgagagtcctaagtggtcaccagaaaaaaagccattcctcagatcaaatgggataaactccttgtacctcttgctgtgttttggatccctttgccttgttttgtaagaggtgaagccccttgatcatgtccaaggttttgtctttcactgtctgaatcatgtttccagctgcttgaccctactgtgtgggttcagaactcgtttgggcataacaactaagtctctttccagtcagtataataaaggagtgatgtgcaat

SEQ ID NO: 3744 - DNA, 914 bp, Rattus norvegicus
  Genbank Accession No. NM_053293
  misc_feature (1)..(914): n = a or c or g or t
atggtgctggagctctatctggatctgctgtcgcagccctgtcgcgctatttatatcttcgccaagaagaacaatatcccgttccagatgcatactgtggagctgcgcaagggtgagcacctcagcgatgcctttgcccaggtgaaccccatgaagaaggtaccagccatgaaggatggtggcttcaccttgtgtgagagtgtggccatcctgctctacctggcgcacaagtataaggttcctgaccactggtacccccaagacctgcaggcccgtgctcgtgtggatgagtacctggcatggcagcatacgacccttcggagaagctgtctccggaccctgtggcataaggtgatgttccccgttttcctgggtgagcagatacgcccggagatgctggcagccacattggcagatctggatgttaacgtacaggtgctggaagaccagttcctccaggacaaagacttccttgtcggaccgcacatctccctggctgacgtggtagctatcacggagctgatgcatcctgtaggtggtggctgcccagtctttgaagggcgtcccaggctggctgcatggtacaggagagtggaggcagctgtggggaaggacctcttcctggaggcccatgaggtcatcctgaaggtgagagactgtccacctgctgaccccgtcataaagcaaaagctgatgcccagagtgctgaccatgatccagtgacgtcagaagcttcatccctgcaccagccaggccactcgcattacacgactgtgcgccccagccctcacggcatgatggtttctgggcgagggtccctcttcacccttttcccatgctagccacccatggtcacaactacaaccactacttttccctttgagtttgggcaataaaccgaggctcgattcgan

SEQ ID NO: 3745 - DNA, 1973 bp, Rattus norvegicus
  Genbank Accession No. NM_053297
cggcagcgacccgtcctaagtcgacagacgtcctctttaggtattgcaacaggatctgaagtacgcccgaggatctcagaaaccatgcccaagccagacagcgaagcagggactgccttcattcagacccagcagctccatgcagccatggctgacaccttcctggaacacatgtgccgcctggacattgactccgcacccatcacggcccgcaacactgggatcatctgtaccattggccctgcttcccgatctgtggagatgctgaaggagatgattaagtctgggatgaatgtggctcggctgaatttctctcatggaacccatgagtaccatgcagagactatcaagaatgtccgtgcagccacagaaagctttgcatctgatcccattctctaccgacctgttgcggtggctctggatacaaagggacctgagatccggactggactcatcaagggcagcggcaccgcagaggtggagctgaagaagggagccacactgaagatcaccctggacaacgcctacatggagaagtgcgatgagaacatcctgtggctggactataagaacatctgcaaggtggtggaggtgggcagcaagatctacgtggacgatgggctcatctccctgcaggtgaaggagaaaggtgctgactacctggtgacagaagtggaaaatggtggctccttgggcagcaagaagggcgtgaacctgcctggtgctgctgtggacctccctgctgtgtcagaaaaggacatccaggacctgaagtttggggtggagcaggacgtggacatggtgtttgcgtctttcatccgcaaggcggctgacgtgcatgaggttaggaaggtcctgggagagaagggcaagaacatcaagatcatcagcaaaatcgagaaccatgaaggtgtccgcaggtttgatgagattttggaggccagcgatggaatcatggtagctcgtggtgacctgggcattgagattccggcagagaaggtcttcctagctcagaagatgatgattggacgatgcaaccgagctgggaagccagtcatctgcgccacccagatgctggagagcatgatcaagaagccacgccccacccgtgctgaaggcagtgacgtggccaatgcagtcctagatggagctgactgcatcatgctgtccggagaaacagccaaaggggactaccctctggaggctgttcgcatgcagcacctgatagctcgagaggctgaggcagccgtgttccaccgcctgctgtttgaagagcttgcgcgagcctccagtcaatccacagaccccctggaggccatggccatgggcagcgtggaggcctcttataaatgtttagcagcagctttgatagttctgacggagtccggcaggagtgctcaccaagtggcccggtaccgcccaagggctcctatcattgctgtgacacgcaatccccagacagcccgccaggcccatctgtaccgtggcatcttccctgtgctgtgtaaggatgccgtactggatgcctgggctgaggacgttgatcttcgtgtgaacttggccatgaatgttggcaaggcccgaggcttcttcaagaagggagatgtggtcattgtgctgactggatggcgccctggctctggcttcaccaacaccatgcgtgtagtgcctgtaccatgatgatcctctggagcttctcttctagcccctgtcccttcccctcccctatcctatccattaggccagcaacgcttgtagtgctcactctgggccatagtgtggcgctggtgggctgggacaccaggaaaaattaatgcctctgaaacatgcaatagagcccagctatttttcatggccctacttgagccaggggtgaaggaggaatgcaggattggaaaccctctgactttatcacagaagggcagcattatctctgtgttctttgctcctgtagaaagttttccagagaattc

SEQ ID NO: 3746 - DNA, 1484 bp, Rattus norvegicus
  Genbank Accession No. NM_053318
tgtgtggtctttgcagctcgccatggctaggacagtagtagcactaaatatcctggtattgctgggcctgtgctggtccctggctgttgccaaccctcttcctgctgcccatgagactgttgctaaaggtgaaaatgggaccaagccagactcagatgtaatcgaacactgctcagatgcctggagctttgacgctaccaccatggatcacaatgggaccatgctgttctttaaaggggagtttgtgtggaggggtcactcagggatccgggagttaatctcagagaggtggaagaatcccgtcacctcagtggatgctgcattccgtggtcctgacagtgtcttcctgatcaaggaagacaaagtctgggtgtatcctcctgaaaagaaagagaacgggtatccaaagttgttccaagaagagtctcctggaatcccatacccaccagacgcagctgtggaatgccaccgtggagaatgccagagtgaaggtgtcctcttcttccaaggtaaccgcaagtggttctgggactttgccacaagaacccaaaaggaacgttcctggcctgctgttgggaattgcactgcggccttgaggtggcttgaacgctactactgcttccagggtaacaagttcctgagatttaaccccgtcacaggagaggtgcctcccagataccctctggatgcccgtgactacttcatatcctgccctggcagaggccatggtaaactaagaaatggaactgctcatgggaatagcacccatcctatgcattcgcgttgtaacgcagatcctggcctgtctgcactgctgtctgaccatcgaggtgccacctatgccttcagtggctcccactactggcgtctggactccagccgtgatgggtggcatagctggcccattgctcatcactggccccagggtccttcagcagtagatgctgccttttcctgggatgagaaagtctatctgatccagggcactcaagtatatgtcttcctgacgaaggggggcaataacctagtaagtggttatccaaagcggctggagaaggaacttgggagccctcccgggatcagccttgataccatagatgcagccttttcctgccctggttcttccaagctctacgtcacatcaggacggcggctttggtggctggacctgaagtcaggagcccaggcgacatgggcagagctttcctggccccatgagaaagttgatggtgccctgtgtttggaaaagtcccttggtccctactcatgctcttccaatggtcccaacttgttctttatccatgggcccaatttatactgctatagcagtatagacaaactgaatgcagccaagagtctgcctcagccccagaaagtgaacagcatccttggctgcagtcaataaaaagccctgatgggaattagcccagcccaccccacctctccatttccattctaataaaaccagatggtttcttcacatg

SEQ ID NO: 3747 - DNA, 505 bp, Rattus norvegicus
  Genbank Accession No. NM_053319
ggagagcggccgcgctgtcgcctctgctgcttgagcggcgccagcaccttccctaggagctcgcagcagccggctggcccctgctccacggtaaccatgtgcgaccggaaggcggtgatcaaaaatgcagacatgtcggaagagatgcaacaggactcggtggagtgcgctactcaggcgttggagaagtacaacatagagaaggatatcgcggcccatatcaagaaggagtttgacaagaagtacaaccccacctggcactgcatcgtgggccggaacttcggtagctacgtgacacacgagaccaaacacttcatctacttctacctgggtcaggtggccattctcctgttcaaatctggttaatagcatggactgtgccaaacacccagtgatccatccaaaaacaaggactgcatcctaaattccaaataccagagactgaatcttcagccttgctaagggaacacctcgtttgaatctgttgtgttttgtacagggcacc

SEQ ID NO: 3748 - DNA, 1390 bp, Rattus norvegicus
  Genbank Accession No. NM_053323
gaggcagagcgggtccacaggccgcagccatgggtagccgcgtgtcccgagaggagttcgaatgggtctacacggaccagccccacgccgcccggcgcaaggagatcttagcaaagtatccagagatcaagtccttgatgaaacctgaccacaatctgatctggattgtagccatgatgcttctcgtccagctggcttcattttacttagtcaaagatttggactggaaatgggtcatattttggtcctatgtctttggcagctgccttaaccactccatgactctggctatccatgagatttcccacaatttcccctttggccaccacaaggccctgtggaaccgctggtttggaatgtttgctaacctctctctcggagtgccatactcgatttcctttaagagataccacatggatcatcaccggtacctcggggcggacggcatcgatgtggatatccctactgatttcgagggctggttcttctgcaccactctcaggaagcttgtctgggttatccttcagcctctcttctatgcgtttagacccctgttcatcaaccccaagccaattacccatctggaagtcatcaacgctgtgatccaggtcacttttgacgtcctcgtctactatgtttttggagtgaagtctctagtgtacatgttggcagcctccctgctcggcctgggcttgcacccaatttcggggcatttcatagccgaacattacatgttcctaaagggacacgaaacatactcctactatggccctctgaacttactcaccttcaatgtgggctatcacaacgaacaccacgacttccccaatgttcctgggaaaaacctgcccctggtgagaaaaatcgcaagtgagtactatgataacctcccacactacaactcctggatccgagtgctgtatgactttgtgatggacgacacaataagtccctactcacggatgaagaggcccccgaaagggaatgagattcaggagtaaatgccatcacagccaaaggaattcctgtccacacttcagaataggagataaagtggagctttcctctcgttaaggtcagtgatgctcagaagccgcgctgacgtaatttccggctcgctgacgtaatttccggctcgctgacgtaatttccggctaggatctcggtgtcatcagaagctcctcggccttcagacagccagaactcacacttgctcgcagccgcacgcctgctcaccgtactcacgcaacgtatgactgttactgaggcgtcctcactcatgtctgtcctgctgcaagcaaatcataaaagcttatgttatttttcactgtaaggttttactttattaaaagcccctaataaactgaactgttatcaaaaaaaaaaaaaa

SEQ ID NO: 3749 - DNA, 1812 bp, Rattus norvegicus
  Genbank Accession No. NM_053329
atggccctgaggacaggaggcccagccctggtggtgcttctggctttctgggtggcactgggcccctgtcacctgcaggggacagatcccggagcgtcggcagatgccgagggcccccagtgccccgtcgcctgtacctgcagccatgatgactacacagatgagctcagcgtcttttgcagttcaaagaacctcacacatctgcctgatgacatcccagtcagcaccagagccctgtggcttgatggcaacaacctctcttctatcccctcagcggccttccagaacctgtccagcctggactttctcaacctgcagggcagctggctgaggagcctggagccacaggcactgctggggctgcagaacctctactatctgcacctggaacggaaccggctccggaacctcgccgtgggcttgttcacacacacaccgagtctggcttcactcagcctgagcagcaacctcttgggccggctggaggaagggctgttccagggcctcagtcacctttgggacctcaacctgggttggaacagtctagtggtcctgcctgacacagtgttccagggactgggcaacctccacgagctggtgctggctggcaacaaactgacttacctgcagcctgcgctcttctgtggcttgggcgagctgcgggagctggatctgagcaggaacgcactccgaagcgtcaaagctaacgtctttgtacatttgcccaggctgcagaagctgtacctggaccggaacctcattacagccgtggcccctcgtgcctttctgggcatgaaggccctgcgttggctggacctgtcgcacaaccgcgtggctggcctcatggaggacaccttcccaggcctgctgggcctgcacgtcctgcgcctggcacacaatgcgatcgctagcttgcggccgcgcactttcaaagacctgcacttcctggaggaactgcagctgggccacaatcgaatcaggcagctcggggagaggacattcgagggcctggggcagctggaggtgctgacgctcaatgacaaccagatcactgaggtcagggtgggcgccttctctggccttttcaatgtggcggttatgaatctctccggcaactgtctgaggagcctcccggagcgggtgtttcagggtctggacaaactgcacagcctgcacctagagcacagctgcctgggtcacgtccgcctgcacacttttgctggcctctcagggctgcgcaggctcttcctcagggacaacagcatctccagcatcgaagaacagagcctggcagggctttcggagctcctggaactggatcttactaccaaccgcctcacacatctgccccgccagctcttccagggcctcggccacctggagtacctgcttctctcctacaaccaactgacgactttatccgcggaggtcctgggccctctgcagcgggccttctggttggatatctcacacaaccacctggagacgctggccgaaggccttttctcatctctggggcggcttcgctacctcagcctcaggaataactccttgcagaccttttcaccacagcccggcctggagcgcctgtggcttgatgccaacccctgggactgcagctgtcccctcaaggcgcttcgagactttgccctgcagaaccctggtgttgtcccccgctttgttcagactgtctgtgagggggacgactgccagccggtgtacacctacaacaatatcacttgcgctggccccgccaacgtctcgggcctcgacctaagagacgttagtgaaacacattttgtgcactgctga

SEQ ID NO: 3750 - DNA, 554 bp, Rattus norvegicus
  Genbank Accession No. NM_053330
ctttccgccggggcagccatcttccagtaactcgccaaaatgacgaacacaaaaggaaagaggaggggtactcggtatatgttctctagaccttttaggaaacatggagtcgttcctttggccacatacatgcgaatctacaagaagggtgatattgtagacatcaagggaatgggcactgttcaaaaaggaatgccccataagtgttaccatggcaaaaccggaagagtctacaatgtcacccagcatgccgtgggcatcattgtgaacaagcaagttaaaggcaagattctggccaagaggatcaatgtgcggattgagcacatcaagcactcaaagagcagagacagcttcctgaagcgggtgaaggagaacgatcagaagaaaaaggaagccaaagagaagggcacctgggttcagcttaacggccagcctgcgccacccagagaagcccactttgtgaggactaacggaaaggagcctgagctgctggagcccattccatacgaattcatggcctaatgtatacaaaggaaataaagaacccgaactgc

SEQ ID NO: 3751 - DNA, 1858 bp, Rattus norvegicus
  Genbank Accession No. NM_053337
cccgccgcgtctagagcggcgcccagtgcaggatgttgcaggagacggcggcggtgtcgttggcggtagcgggcggaggagcggtgacggctgaggcgcccgcgggcgggataaaatggcggatttcgaggagttgaggaatatggtttctagttttagggtttctgaattacaagtgttactgggctttgctggacggaataaaagtgggcgcaagcatgacctcctgatgagggcgttgcatttactgaagagtggctgcagccctgcggttcagattaaaattcgagaattatacagacgccgatacccacggacacttgaaggactttctgatctatccacaatcaaatcttcagttttcagtttggatggtagctcatcaccagtagagcctgacttggccgtggctgggatccactcgttgccttctacttccattgcacctcattcaccgtcatctcctgtcgcttctgtgctgcttcaagacactaagcccacgtttgagatgcagcaaccatctcctcccattcctcctgtccatcctgacgtgcagttaaaaacgctgcccttctatgacgtccttgatgttctcatcaagcccacaagtttagttcaaagcagtattcagcggtttcaagagaagttttttatttttgctttgacaccccagcaagttagagagatatgcatttcaagggattttttgccaggtggcaggagagactacacagtccaagtccagctgcgactttgcttggcagagaccagttgccctcaagaagataactatcccaatagtttgtgtataaaagtaaatgggaaactctttcctttgcctggctatgcaccaccacctaaaaatgggatcgaacagaagcgtcctggacgccccctgaatattacatctttagtgagattgtcttcagctgtgccaaatcagatttctatttcttgggcatctgaaattggaaagaattactccatgtctgtgtatcttgtacgacagcttacatcagccatgttattacagagattaaaaatgaaaggtattagaaatcctgatcattccaaagcactcattaaagaaaaacttactgcagatcctgatagtgaaattgctacaactagtcttcgagtgtccttgatgtgccctttaggaaaaatgaggctgacaatcccgtgccgcgcagtgacgtgtacacatctgcagtgctttgatgctgccctgtatcttcagatgaatgagaagaagcccacctggatttgtcctgtttgtgacaaaaaggctgcctatgagagtctgatactagatgggctttttatggaaattctcaatgactgttctgatgtggatgagatcaaattccaggaagatggttcctggtgccccatgagacctaagaaagaagctatgaaagtaaccagccagccctgtacaaaagtagaaagttcaagtgtctttagtaaaccttgttcagtgactgtagccagtgatgcaagcaagaagaagattgatgttattgatctaacaatagagagctcttctgatgaagaggaagaccctcccgccaaaaggaaatgcatctttatgtcagaaacacaaagcagtccaaccaaaggggttctcatgtatcagccatcttctgtaagggtgcccagtgtgacttcagttgatcctgctgctattccaccttcattaacagactactcagtaccattccaccacacgccagtgtcgagcatgtcatcagatttgccaggagaacaaagaagaaatgatattaataacgaagtgcagcttggaacatcttctgatactgtgcaacagtgaatgcaaaataaaacakaatttgta

SEQ ID NO: 3752 - DNA, 1607 bp, Rattus norvegicus
  Genbank Accession No. NM_053341
cctcgagcggcggcggcgcaggtctcccggccaagtccccacttctggctgctcatgccactgggactggggcgaaggaaaaaagcaccacctctggtggaaaatgaggaggcggagccaagccggagtgggctgggcgtcggggagcccgggcccctgggtggaagtggagcaggggaatcccagatgggtttgcccccacctcctgcttccctccggcctcgcctcgtgttccatacccagctggcccacggcagccccacgggccgcatcgagggcttcactaatgtcaaggagctgtacggcaagatcgctgaggccttccgactaccggctgctgaggtgatgttctgtaccctcaacacccataaagtggatatggacaagctgctggggggccagatcgggctggaggacttcatctttgcccatgtcaaggggcagcgcaaagaggtggaagtattcaagtctgaggatgctctggggctcaccatcaccgacaacggggccggctatgccttcattaagcgcatcaaggaaggcagtgtgattgaccacatccagctcatcagcgtgggtgacatgattgaagccatcaacgggcagagcctgctgggctgtcggcattatgaggttgccaggctcctcaaagagctgccccgaggccgcaccttcaccctcaaactcaccgaacctcggaaggcgtttgatatgatcagccagcgttcatcaggtggtcaccctggctcaggcccacaactgggcactggccgagggaccctccggctccgatcccggggccctgccacagtggaggatctgccgtcagcttttgaggaaaaggccattgaaaaggtggatgacttgctagagagctacatggggatcagagacacagagctggctgccacgatggtggagctggggaaagacaaaaggaacccagacgaactggcagaagctctggatgaacggctcggtgacttcgcattcccagatgaattcgtctttgatgtctggggagccatcggggatgccaaggttggccgctactaagactgggactgaacctggaccttgagataacctgctttgcccagctggggtttccagaaaccacagccaagacctgggctgacagcttaggctgtaactccgcagcctggggatggcacaggctgcaagtgccctgtggtccaggccccgctccaatcagtaccgccacggtgcccagcctggttggggtccccggccaacccctgccgggttccccacctacctcaatagagtaagcgcatggggagggaccaacacactaggcagccagccacctctatccccaacacttcccactatcagctggcaactgccccttctgtccccctggcctcagctctcttcggggtcatgacctccctactttactttttttgctttgtttttttcaagacaaagtcactatgtagctctggctgtcctggaactccttctgtaaaccaggctggccttgaactcacagagatccacctgcatctgcattcacagtgctgggaataaaggtgtgcatcaccactcccaaaaaaaaaaaaaaaaaaaaaaaaaaaaaa

SEQ ID NO: 3753 - DNA, 1392 bp, Rattus norvegicus
  Genbank Accession No. NM_053348
cctcctctgattgcaattataaaacggctcaagcaatcttgaggccccaccaatagggcccgtcctgtcagctcgaccctgacacgtcctggatcttgttctccacagaatgggtgtgctacggcttctggtgctctgcaccctggctgcatgctgtgtggcccgctctcccccagctccacccctgccaaacgcccccttcgcacctctgcgtcccctgggctgtaacgactctgaagtgctggcagttgcaggttttgccctgcagaacatcaacagagtccaaaaggatggctacatgttgaccctcaacagagtacacgatgctcgggttcaccgtcaggaagacatgggctctctgttctacctcacgctggacgtcttagagactggctgccacgtgctcagcaggaaggcactgaaggactgcggaccgaggattttctatgagactgttcatggacagtgcaaagctatgtttcacgttaacaagccaagaagagttctctacttacctgcttataactgtacacttcgcccagtttctaaaaggaagattcattctatgtgccctgactgcccgcatcccgttgacttgtcagcccccagtgttctggaagctgccacagaatcacttgcgaagtttaacagcgagaacccctcaaaacaatatgcactcgtcaaagtcaccaaggctacgacccagtgggtggttggtccttcttactttgtggaatatttgatcaaagagtcaccatgtacccagtctcaggacagctgttcactccaggcctccgactctgagcccgttggtctttgccaaggttcactgattaaaagtcccggggtccctcctcaacgctttaaaaagactgtcactgtgtcgtgcgagtttttcgaatctcaggaccaggtccctggaggtgagaaccctgctgatacccaagatgctaagaaactccctcagaaaaacacagcccctaccagctcaccctccataactgcaccaagaggatctatccaacacctccctgagcaggaggagcctgaagactccaagggaaagagtcctgaggaaccctttcctgtgcagctggatctaaccacaaacccacagggtgacacactggatgtctccttcctctacctggagcctgaggaaaagaaactggtggtcctgcctttccctgggaaggaacagcgctcccctgagtgcccggggcccgaaaagcaaagaaccccctgatgctccccgctgagactcactagcagggttccacggggtacggtcccctgcagtagatgggaggtggtgggcattgggaaggcacagacaatcaaatgtagaccggctaataaagtgtgtcctttggatgcttcttgatctcaaaa

SEQ ID NO: 3754 - DNA, 4474 bp, Rattus norvegicus
  Genbank Accession No. NM_053356
atgctcagctttgtggatacgcggactctgttgctgcttgcagtaacgtcgtgcctagcaacatgccaatctttacaaatgggatctgtacggaagggccccactggagacagaggaccgcgtggacaaaggggcccagcaggtccccgaggcagagatggtgttgatggtcccgttggccctcctggtccccctggtgcccctggcccccctggtccccctggcccccctggtcttactgggaactttgctgctcagtattctgacaaaggagtttcagctggccccggaccaatgggcttaatgggacccagaggccctcctggtgctgtcggagcccctggccctcaaggtttccaaggacctgctggtgagcctggtgagcccggacaaacgggtcctgcaggttcccgtgggccagctggccctcctggcaaggccggtgaagatggtcaccctggaaaacctggaagacctggcgagagaggagtcgttgggccacaaggtgctcgtggtttccctgggactcctggacttcctggcttcaaaggcattcgaggacacaacggtctggatggattgaaaggacagcctggtgcccagggtgtgaagggtgaacccggtgcccctggagagaatggaaccccaggtcaagcaggagcccgagggcttcctggtgagagagggcgtgtcggagctcctggtccagctggtgcccgtggcagtgatggcagtgttggccccgtcggccctgctggtcccattgggtctgctggtcctcctggtttcccaggtgctcctggtcccaagggtgaacttgggcctgttggtaaccctggccctgctggtcctgctggtccccgtggtgaagcgggtcttccgggtctttctggccccgttggacctcctggcaaccctggagcaaatggcctcactggtgccaagggagccactggactccctggtgttgctggggctcctggtctccccggtccccgtggtattcctggccccgttggtgctgctggtgccactggtcccagaggacttgttggtgaacctggtcctgctggctccaaaggagagactggtaacaagggtgagcctggctctgctggagcccaaggtcctcctggtcccagcggtgaagaaggaaagagagggtcccctggagagcctggatctgctggtcctgcagggcctccagggctgagaggcagccctggttctcgaggtcttcctggagctgatggcagagctggtgtgatgggccctcctggcaatcgtggttcaactggccctgctggagtccgaggtcctaatggagatgccggtcgccctggagaacctggtctcatgggacccagaggtcttcccgggtctcctggaaatgttggcccagctggtaaagaaggccctgtgggtctccctggcatcgatggcagacctggcccaattggcccagctggaccaagaggtgaagctggcaacatcggattccctggacccaaaggcccctctggtgatcctggcaaacctggtgagaaaggccatcccggtctcgctggtgctcggggagctccaggtcccgacggcaacaatggtgctcagggccctcctggacctcagggtgttcaaggtggcaaaggtgaacagggccctgctggtcctccaggcttccagggtctcccgggtccctctggtaccgctggagaagttggcaagccgggagaaaggggtcttcccggtgaattcggtctccctggtcctgctggtccaagaggagaacgtggtcccccaggtgagagtggagctgctggtccttctggtcctattggaatccgaggtccctctggagccccagggcctgatgggaacaagggtgaagctggtgcagtcggtgctccaggctctgctggtgcctctggtcctggtgggcttccaggagagaggggtgctgctggcatacctggaggcaaaggagaaaagggtgaaactggtctcagaggtgaaatcggcaaccctggtagagatggtgctcgaggtgctcctggtgctataggtgcccctggtcccgctggagcctcaggtgaccggggcgaagctggtgctgctggtccttctggccctgctggtcctcgaggtagccctggtgaacgtggtgaggttggtcctgctggccccaatggatttgctggtcctgctggttctgctggccaacctggtgctaaaggagaaaagggaaccaaagggcctaagggagaaaatggcatcgttggtccaaccggacctgtcggagctgctggcccatctggtcctaatggcccacctggccctgctggaagtcgtggtgatggagggccccctggtatgactggcttccctggtgctgctggacggactggtccccccggacccagtggtattactggcccccctggtccccctggtgctgctggtaaagaaggtattcgtggtccccgtggtgaccaaggtccagttggccgaactggagaaataggtgcatctggtccccctggatttgctggcgagaagggtccttctggagaacctggtaccacaggaccccctggcactgcaggtcctcagggtcttcttggtgctcccggtattctgggtctccctggctctcgaggtgaacgtggccagccaggtattgctggtgctctgggtgaacctggtcctctgggcattgcaggccctcctggggcccgtggtccccctggtgctgtgggcagtcctggagttaatggtgcccctggtgaagccggtcgtgatggtaaccctggcagtgatggtcccccaggtcgtgatggtcaacccggacacaagggagagcgtggttaccctggcaacattggtcccactggtgctgcaggtgctcctggtcctcatggttctgtgggtcctgctgggaaacatggaaaccgtggtgagcctggtcctgctggttctgttggtcccgttggtgctgtcggtccaagaggtcctagtggccctcaaggtattcgaggtgacaagggagagcctggtgacaaaggggccagaggtcttcctggcttaaaaggacacaatggattacagggtcttcctggtcttgctgggctgcatggtgaccaaggagctcctggtcccgtgggtcctgctggtcccaggggtcctgctggtccttctggccccattggcaaagatggtagatctggacatcctggaccagtcggtcctgctggcgttcgtggctctcagggtagccaaggtcccgctggtccccctggtccccctgggcctcctgggcctcctggtgtcagcggaggaggctatgactttggtttcgaaggaggcttctacagggctgaccagcctcgctcacagccttcactcagacccaaggactatgaagttgatgcaactctgaaatctctcaataaccaaatcgagacccttctcactcctgaaggctctagaaagaaccctgcccgcacatgccgtgacttaagactcagccacccagagtggaagagcgattactactggattgaccctaaccaaggatgcactatggatgccatcaaagtgtactgcgatttctctactggtgaaacctgcatccaggcccaacctgtcaacaccccagccaagaatgcatacagccgtgcccaggccaacaagcatgtctggttaggagagaccatcaatggtggcagccagtttgaatacaacgcagaaggggtgtcctccaaggaaatggcaactcagctcgccttcatgcgcctgctagccaaccgtgcttctcagaacatcacctaccactgcaagaacagcattgcgtacctggacgaggagacaggccgcctgaataaggctgtcattctgcagggctccaacgacgtcgaacttgttgctgagggcaacagcagattcacctacactgtccttgtcgatggctgctccaaaaagacaaatgaatgggacaagacagtcattgaatacaaaacgaataagccatctcgcctgccattccttgacattgcacctctggacatcggtggtactaaccaagaattccgtgtggaggttggccctgtctgtttcaaataagtgaactcaacctaaattaaaaaacaaaaacccctgaaaaaaactttctctttgccatttcttcctttaaaaaaaaaaaaaaaactgaaagctgaatccttccgtgttttctatgcacctacatcttaaactgtgggcaaaagagaaggattggtcagagcagtgtgcaatatgatccagataagtcccctccctcaggccctccccaaaacgtttgcagtgttatttctgtgggtttttttttaaacactctgacacctgttgtggacattgtcaacctctgtaagaaaacccaaataaaattttaaaaataaaataaaaagaaacccatgaacatttgcaccaaaaaaaaaaa

SEQ ID NO: 3755 - DNA, 2650 bp, Rattus norvegicus
  Genbank Accession No. NM_053357
gccagagcctaaacaggcagcagaatcacagtgacaggttaaaaatcaagcttgacttgtgacgacttgaactgtgacgacttgaattgtgatgacggaatcttttcagggtatctgaagctcagcgcacaactgctgtgacaccgctttgtggacaatggctactcaagctgacctcatggagttggacatggccatggagccagacagaaaggccgctgtcagccactggcagcagcaatcttacctggattctggaatccactctggtgccaccaccacagctccttccctgagtggcaagggcaatcctgaggaagaagatgtggacacctcccaagtcctttatgagtgggagcaaggcttttcccagtccttcacgcaagagcaagtagctgacattgacggtcagtacgccatgactcgggctcagagggtccgagctgccatgttccctgagacactagatgagggcatgcagatcccatccacgcagtttgatgccgctcatcccactaatgtccagcgcttggctgaaccgtcacagatgctgaaacatgcagttgtcaatttgattaactatcaggatgacgcggaacttgccacccgtgcaattcctgagctgaccaaactgctaaatgacgaggaccaggtggtcgttaataaagctgctgttatggttcaccagctttccaaaaaggaagcttccagacacgccatcatgcgctcccctcagatggtgtctgccatagtgcgcaccatgcagaatacaaatgacgtagaaacagcccgttgtaccgctgggaccctacacaacctttcccaccatcgagagggcttgttggccatctttaaatctggcggcatcccagcgctggtgaaaatgcttgggtcgccagtggattccgtactgttctacgccatcaccacgctgcataatctcctgctacatcaggaaggagctaaaatggcagtgcgcctagctggtgggctgcagaaaatggttgctttgctcaacaaaacaaacgtgaagttcttggctattacgacagactgccttcagatcttagcttacggcaatcaggaaagcaagctcatcattctggccagtggtggaccccaagccttagtaaacataatgagaacctacacgtacgagaagctcctgtggaccacaagcagagtgctgaaggtgctgtctgtctgctctagcaacaagccggccatcgtggaagctggtgggatgcaggcactggggcttcacctgacagacccgagtcagcgacttgttcaaaactgtctttggactctgagaaacttgtccgatgcagcgactaagcaggaagggatggaaggcctccttgggactctagtgcagcttctgggttctgatgatataaatgtggtcacctgcgcagctggaattctctctaacctcacttgcaataattacaaaaacaagatgatggtgtgccaagtgggtggcatagaggctcttgtgcgcactgtccttcgtgctggtgacagggaggacattaccgagcctgccatctgtgctcttcgtcatctgaccagccgacatcaggaagctgagatggcccagaatgccgttcgccttcattatggactacctgttgtggttaaactcctgcacccaccatcccactggcctctgataaaggcaactgttggattgatccgaaaccttgccctttgcccagcaaatcatgcgcctttgcgggaacagggtgcgatcccacgactagttcagctgcttgtacgagcacatcaggacacccagcggcgcacgtccatgggtggaacacagcagcagttcgtggagggcgtccgcatggaggagatagttgaagggtgcactggggctctccacatcctcgctcgggatgttcacaaccggattgtgatccgaggactcaataccattccactgtttgtgcagttgctttattctcccattgaaaatatccaaagagtagctgcaggggtcctctgtgaacttgctcaggacaaggaggctgcagaggccattgaggctgagggagccacagctcccctgacagagttgctccactccaggaatgaaggcgtggcaacatatgcggctgctgttctattccgaatgtctgaggacaagccacaggactacaagaaacggctttcggttgagctgaccagttccctcttcaggacagagccaatggcttggaatgagactgctgatctcggactggacattggtgcccagggagaagcccttggatatcgccaggacgatcccagctaccgttcttttcactctggtggatacggccaggacgccttggggatggaccctatgatggagcatgagatgggtggccaccaccctggtgctgactatccagttgatgggctgcctgacctgggacacgcccaggacctcatggacgggctgcctccaggtgatagcaatcagctggcctggtttgatactgacctgtaaatcgtcctttaggtaagaaagcttatgaaagccagtgtgggtgaatactttactctgcctgcagaactccagaaagacttggtagggtgggaatggttttaggcctgttgtaaatctaccacaaaacagatacatacttggaaggag

SEQ ID NO: 3756 - DNA, 780 bp, Rattus norvegicus
  Genbank Accession No. NM_053371
gacgccatgcgccctgggcgtgatggagcaccagcagcagcaactgagaaacttgcgagactttctgttggtctacaatcggatgacagaactgtgcttccagcgctgtgtgcccagcctgcaccaccgagctctggacgctgaggaggaggcctgcctgcacagctgtgctgggaagctcatccattctaaccaccgcctcatggccgcttacgtgcacctcatgcccgccctggtccagcgccgcatggcggactacgaggctgcctctgccgtgccaggtgttcctgcagaacagcccagagactcgccatcaggcagctagctagctgtccctgaccgcaggagagaaggtggttttgctgtgggcacattggtcttcaatacgatcctcctgtctcagcctcccaggaaggtggagacccaggatattgtgtgactgctgagagagctctacatcagcatctgtatgtatcccttcaataaacatgtgctgtgagttactggaattacagacatgggctacaactggttgctagataattctttaggaatataaaaattgctgaccagaagcttccctacagagtgacctgtgtacatgattaatttcactccttgacaagtacaaacgtgagtagagcagcttgtgaacttaattccccaaaccaggaaggtggagacccaggatattgtgtgactgctgagagagctctacatcagcatctgtatgtatcccttcaataaacatgtgctgtgaaaaaaaaaaaaaaaaaaaaa

SEQ ID NO: 3757 - DNA, 626 bp, Rattus norvegicus
  Genbank Accession No. NM_053374
catcatgaccatgagacactgtggctgtgcagcagaccccagtccttggtgggtcctgcttctatatgtccatgttgtcattctggccagagccacatctgcacctctgacaactgccactgtcttaaccagaagctcaaaggacccgtgctcttcctggtctccagcagtcccaactaagcagtacccaacattggatgtgatctggccagagaaagaagtgccactgaatggaacgctgaccttgtcctgcactgcctgcagccgcttccccaacttcagcatcctctactggctgggcaatggctccttcattgagcacctcccaggccggctgagggagggccacacaagccgggagcagaggaacgcaagcacctggctacacagggccttggtgctggaggaactgagcccctccctactaagtaccaacttctcctgtctgtttgtggatcccggacaggtggcccagtatcatgtcattctggcccagctctgggatggattgaagacagccccatccccttctcaagaaaccctctccagccacagcccaggacccagatcagcaggcccaggggccccatgaagccaaccacagcatgaccttgaccagagcctgg

SEQ ID NO: 3758 - DNA, 4174 bp, Rattus norvegicus
  Genbank Accession No. NM_053381
agtgtctcctgtaccagcagaagctccaggaccctgtcctacacgcctgcctctgcggcatcttggcccactgaacagccatgagacggcaactccgctccagaagggcgccggcctttccttatggttaccgctacagacttgatgatcaggatgaaatgaatcacaactacttagcggacgaagaggaggaagcagaagaagaggctcaggtgatgatggtgcctggtctggaggaagaggaagaagaggaggaaggaaaagaggaggaggaagaaagggaggaagaagaaggtcagggtcagtcaacaggcaatgcctggtggcggaaattgcagatcgtgaatgaatacctgtgggacccggagaaaaggatgtctctggcccgaacaggtcagagtcggagtcttattttagtcatttacttcttcttctatgcctccctggctgccgtgatcaccctattcatatatatgctgttcctagccatcagtccttacatgccgaccttcacggagcaggtgaaacctcctggagttatgatcagacccttcgctcatagccttaacttcaacttcaacgtttctgaacctgaaacttggcagcgttatgtcattagcctaaatggctttctccagggctataatgacagtcttcaagaggaaatgaatatagattgtcctcccggtcagtacttcatccaagatggagatgaagatgaggacaagaaggcctgccaatttaaacgctccttcctgaagaattgctctgggctggaggaccccacttttggatattctactggacagccttgcatccttctcaagatgaaccggattgtaggctttcgtcctgaatttggagatcctgtgaaggtgtcctgcaaagttcagaaaggtgatgaaaacgacattcgatccatcaattactacccggagtcagcttcttttgacctccgctactacccttactatggcaaactgactcacgttaactacacctccccgctggtggcaatgcattttacagacgtggtgaagaaccaagaagtgcctgtacagtgccagctgaagggcaaaggcatcgtaaatgacgtcatcaatgatcgtttcgtcgggaggataatctttaccctgaacatagaaacctaggaactccagggggccactcccaccagctctgattctgattctgttctatccctggtagcacctcaatccttttttctttttcagttatgacacagccagatggacacctaaaacagcagatcatctttccttgcctttgacgtgtgtatgacgtgatattgtgggacctgcttgggtttttttaaggtcatcttctctcctgatgacaaatattaatttcctttccttcacttcgaattaagacctattcttgctgctagaagtctcactatctacaaaaacagtatttgatagcatttaccattgtcaggagaatgttctatcatgctttctaaaaatgtgttggttttagaggtgatattattcccagacaggcggataatctaaccgacctatacccacctttaaaactgcctgtcaaggtctttccttagaaaccaacatcagaccaacccagactactactctctctacagaactttatatctgaggtaggggttgaaaatttggctgtctcccataggtgacaatctccaacactgatttaaagactacattattttcaaccaggacagcaggacagcaagcagtgctgacaggttactgatctgggctagagatgaagactttctgtgagacttttgtgaggagagttagatcctagtgcaagtgcgaagaactcttagcatagggtgtgcttggttgttgagtgctctgtagttttaccatccaaggcaaacaggtttttctgcactccgggcagaagagaaaacatgaaaaatcttctttggtctaattttcttggcccatgtgcttgatagttgtgtggttttctttgagatcagcagcgatgggtgccttgaaacacccccccaccaacccagctacaaccttggggattgaaattagggttctccagctaaaacatagcaagacagaaagcttctgtcaggcctccctaaagccagtgctcattagccagttttgcatctacttttaaaaaaccacaggaggcagatgtgtatccaggttgtggatcagccaagttgctttggttttatctttggccatgtgaccattccaatcgcttcttaacacctccaccagggggagggctgggacaaaaagaggaggcaagcattacagactagtatagtgtctcagggtccaaagcaagcttaaattccacttaccaggctgcagagtctgaatctactctacaatgtttagcttctcccaaaacaaggaactgggaggactgatggggaaacttggctacaatacaggatgacaagagacctaaaaatagtacatggaaatgctatggggaacgtgaggcacaatggctctctctctctccagctgagaaagtagcagaggaaattacccattggaagccataagcatgaagacatcgtgtggtttgggaattctgaacagttcacatgagagctcagaggaaggatgaggagagtggattgcacaagtatttagggacatggagaggaagggagtctttaaagttttaatcagggaattcctgtgagcatatttgcatttgatcaagagcactggggcagtcataacatcaggagtgaatcggtaaacagaaaggacaaaaccaagacaggaatgtgaggagaggaggaagagtggaaaaatgaccccaggattttgagccgggctaaaatcagtgcgatagtgatattgatcatagagatgaggtataaaagagaaaggttggaaagggagttgtcaagaacactttggggtagttttatcttgtggtttcctctggtcagacactgatatggagatatgaacacttgtaaagtaaaagagaaggaaagcagagagacaaaagcaacttctgattaagtgagctcatttaggaaatatttaatcttgggaacttgagccggttgagtaaacactaacccagctcctaacatggtgctcttctctgggtcttgtggcagaatggacagctattagttcctcttgggaatctcccttatagagcccttctaaatactctccatagactagcgaggggcagacagcatttaacaagcagcaaaagatgagcccgacagcaaggctacataagactccaacacagaactcccaaccctctggagttaccttctcaccaaatttcagtttcctagcctttgaatggaaaacgaataaaagtgagaacgctggagatcatttaaaaatggccttcatcaaaacctcaagactcaatagcaaaagagtatacagcattgatctggaaaggatctttaaggaaaacaacctgcattgcatctgactccaggtccagtgctctctctactcagagctgctgcttacggggaagcaccatcttttgaaaaatcaatagagcgtatcccaaacattctgaaacatgtcaaacgtgagttaaaaatagttaacatttcacaggaatccaactactggtgttatattttatacataatatatggtcctgttgaatatgtttaactattagataaggaattaggaatgattttgtcatatgtgtttctcattcagtggcagatataatgtcaacagtttcaaagaagtattaaaaactactacgacagtttgggctgtcagctggaacatgaaaaatagctttcttatacaaaaatggatattatacagaacaggattaatgagtatgttcgttcatgtgcaattctaactgttcaataaatttctggttgattaatttaaatgggctcccatactgtgccgtaccaggatttgatttctataccatctgttgcaatgcacttggctttacttgattgtcaatgagaaatactacttccacacggcttcatggttttgttcttgctatatactttgtgtataagttttcacttttcactcctttgaaattattttaaagaactctttcttaggcatccatttacttggggtcttcatgtagaaaatgtttatactgttttggggagttggtgacaacaataaatgaaattaaaagg

SEQ ID NO: 3759 - DNA, 519 bp, Rattus norvegicus
  Genbank Accession No. NM_053401
aggaggactacgcggcaagggataggcccaggaaaacgaagaaatggagcagcccctgcagaatggacaggaagaccgccccgtgggaggaggtgagggccaccagcctgctgcaaacaacaacaaccacaaccataaccacaaccacaaccacaaccacaaccacaatcatcaccggagaggacaggcccgccgacttgcccctaactttcgatgggccattcccaacaggcagatgaatgatgggttgggtggagatggagatgatatggaaatgttcatggaggagatgagagagatccggagaaagcttagggagctgcagttgagaaattgtctgcgtattcttatgggggagctctctaatcaccacgaccatcacgatgaattctgccttatgccttgacttcggtcatttcccctgagattcatactgtgattcccgctgtattcctagcccttgcattttcctgacatgcctttaaatgacccgttttgtggtgagccttggtgttattt

SEQ ID NO: 3760 - DNA, 1213 bp, Rattus norvegicus
  Genbank Accession No. NM_053402
cgcaccatgagcccccgttcgtgcctgcggtcgctgcgactcctcgtcttcgccgtgttctcggccgccgcgagcaactggctgtacctggccaagctgtcatcggtgggcagcatctccgaagaggaaacgtgcgagaagctcaaaggcctgatccagaggcaggtgcagatgtgcaaacggaacctcgaggtgatggactcagtgcgccatggcgcccagctggccattgaggagtgccaataccagttccggaaccggcgctggaactgttccacactggactccctgcctgtcttcgggaaggtggtgacacaagggacccgggaggcggcctttgtatacgccatctcttcagcaggtgtggcctttgcagtgacaagagcatgcagcagtggagatctggagaagtgtggctgtgaccggacagtacacggggtcagcccacagggtttccagtggtcaggatgctcggacaacatcgcctatggcgtagccttctcacagtcctttgtagacgtccgagagagaagcaagggggcctcctccagccgggcactcatgaaccttcacaacaacgaggctggcaggaaggccatcctgacacacatgcgggtggagtgcaagtgccatggggtgtcaggctcctgtgaggtaaagacatgctggcgagcggtaccgcccttccgtcaggttggccacgcactaaaggagaagtttgacggcgccacggaggtggagccacggcgcgtaggctcctcccgggcactggtaccgcgaaacgcgcagttcaagccacatacggatgaggacctggtgtacctggagccaagtccagacttctgtgagcaggacatgcgcagcggcgtgctaggcacgaggggccgcacttgcaacaagacgtctaaggccattgacggctgcgagctactgtgctgtggccgcggcttccacacagcgcacgtggagctggcagagcgctgcggctgcaggttccactggtgctgcttcgtcaagtgccggcagtgccagcggctcgtggagatgcacacgtgccggtgaccgtgcccgcctgtgcccaggaccacctgcgtggcccagggaaggccaataacttaaacagtctcccgccacctaccccaaaagatactggttgtattttttgttttggtttggtttttgggtcctcaagttatttattgccaaaaaaaag

SEQ ID NO: 3761 - DNA, 2573 bp, Rattus norvegicus
  Genbank Accession No. NM_053404
  misc_feature (1)..(2573): n = a or c or g or t
gcacgaggccggactgtgtcacgtgacgggtgcgccgggcgttggctcctccctcaccaagatggcgtccttgctgcagtcggagcgggttctctatctcgtccaaggagaaaagaaggttcgggccccgctctcacagctctacttctgccgctactgcagtgagcttcgatcgctggaatgtgtgtcacacgaggtggactctcattattgtcccagctgcttagaaaacatgccatcagctgaagccaaattaaaaaagaatagatgtgccaactgctttgactgtcctggatgcatgcacaccctctccacccgagctacaagcatctccacacagcttccagacgacccagccaaaaccactatgaagaaagcctattacctggcctgtggattttgtcgatggacatctagagatgtgggcatggcagacaaatctgtagctagtggtggttggcaagaaccagaaaatcctcatgcacaacggatgaacaaattgattgaatattaccagcagcttgctcagaaggaaaaggttgaacgagatcgcaagaaactggcacggcgaagaaattacatgcctttggctttttcgcaacacactattcatgtagtggataagtacagccttgggaccaggcttcagcgaccacgagctggtgcatccattagtacacttgccggactttcccttagagaaggagaagaccagaaggaggtaaagattgagccagctcaggccgtcgctgaagtggagcctctgcctgaagactattacacacgaccagtgaacctgacagaggtgaccacccttcagcagcgcctcttacagcctgacctgcagcctgtctcagcctcgcagctttatcctcgacacaagcaccttctgatcaaacggtccctgcgctgtcggaaatgtgaacacaatttgagcaaaccagaatttaatccaacatctatcaaattcaaaatccagttggttgctgtcaattatattccagaagtgagaatcatgtcgatccccaatcttcgctacatgaaggaaagccaggtcctcttgactcttacaaatccagtggagaacctcacccatgtaactctgctggagtgcgaagagggggaccctgataacatcaacagcactgctaaggtggtggtgcctcccaaagagctcatcttagccggcaaggatgcagcagcagagtacgatgagctggcagagccccaggacttccaggatgaccctgacattgtagctttcagaaaagccaacaaagtaggcatcttcatcaaagtcaccccacagcgtgaggaaggggacgtgaccgtgtgcttcaagatgaaacatgattttaaaaacctggctgcccccatccgccctatggaagaaagcgaccagggcacagaagtcatttggctcactcagcatgtggaactgagctttggccctcttcttccttaaaacaaagctacctggtgggcagatcccacccagccatgtcactacagctctcaacagtgtggaagctgctgcttcatcagacatgtttataaagatgtactactgaatcctgtggagtggagggcaggccagggttcggagcacagggtaactgctgttgacaccagtaagcctgtgtctctctgagccctgcacattgagtaacagcatcgttccatcacagtaaaggagtagctgttccatggagggcattgtatttactcgctaagaaacgtgctgtgcgcctgtcacagtttgacagnaagccttagggtgataatccagagcagaccttgtctttgtgccgcagctttggtctcggtgttccaacggctttctgtatttctgtatgccgttaaggataaccctgaaatcataacccttcactggccttggccctggctctcactttgccgatgatttccatttgacagagcagtaggactgtcattgtgtctctaacctagtgatggcagggcaacctgtcgctttcctaaggcactctgtctcttccaaaggaacacagtatacctgtcacttgattgtcattttcctcattagtatatgggacttgtaagtaagaatttgaatggcaagcagttacatgtcatgaaattcatttgttttaatattaccacaatacccaggggctaaggctgcctgccacagggagacaaactttatgaatcttactatctgccctcctctgttctgttttttgtttgtttgtttgtttgtttgtttttcagatgggctcgctccgtgtaactctcgctggcctgaactcaacctgctaggactaaagatccttgcaacatgtccagctcgctgccctgttctataaatcaagaaattgctctaacgttggggcttttagaaagagctgggacagtttatatggacactttgctgcatcacttctggaatgcagaaaacattttaaactaacttttagcatgatccaaactaatgttctttctgctgaattgaaggaaaaattaactgtcaatcccttaaatttaaaactggacacaaagaaaaagaactttcccttaatgaaaaaaaaaaa

SEQ ID NO: 3762 - DNA, 2824 bp, Rattus norvegicus
  Genbank Accession No. NM_053409
cggccgcgtcgaccgggactcttatttggacagtgatctgttgcgcatgcgcggggcttcctgaggcggtgggtggtatattaggcgaagaggcggggtcgcccgagctgccgcgctggcattttctcctggacaaggagagagtgcgggtgcagagagcggagcagagcagtcccgatcctctgagtcgtgaagaaggaagcaacgaagggggttggggttggggcctgaggcaaggctctgctcttgccagagagacaagagctatggctcagaaaccggacggcggtgcaggcctccgcggcttccaggcagaggcctctgtagaagacagcgccttgcttgtgcagaccttgatggaagccatccagatctccgaggctccgcccaccagccaggccacagcagctgccagtgggccgaatgctagtccccagagttcacagcccccaactgccaatgagaaggctgatactgaggtttcagcagctgctgccaggcctaagacaggctttaaggcccagaataccaccacaaaggggccaaatgattactctcaggcacgtaatgccaaggagatgcccaagaatcagcctaaggtggcctttaagtcacagaatgccacctctaaaggtccacatgctgcctctgatttttcccatgcagcatccacaggcaaatcagcagctaaaaagtctgaaatggcctttaagggtcagaataccactactaaggctggccccagtgccacctacaatttcactcagtctcccagtgccaatgagatgaccaacaaccagcctaagacagctaaggcttggaatgacaccactaagatccctggagctgatgcccagacccagaatgtaaaccaggccaaaatggctgacgtagggaccagtgcaggtatctctgaaactgacggtgcagcagcccagacctcagcagatggctcccaggctcagaatgtggagtcccggactataattcggggcaagaggacccgcaagattaataacttgaatgtggaagagaacagcaatggggaccaaaggcgtgcctcgctggcttccgggaactggaggtctgctccggttccagtaaccactcagaacccacctggcgcaccccctaatgtgctgtggcagacaccactggcttggcagaacccatcaggctggcaaaaccagacagccaggcagaccccaccagcacgtcagagtcccccagctaggcagacaccatcagcttggcagaaccccgttgcatggcagaatccagtgatctggcctaacccagtgatctggcagaatccagtgatctggccaaaccccattgtctggcctggcccaattgtctggccaaacccaatggcctggcagagtacacctggatggcagagcccacccagttggcaggctccacctagttggcagagccctcaagattggcaaggccctccagattggcagttaccacctgactggtcaatgcctcctgactggtcctttccctctgactggccttttccacctgactggatccctgccgactggccaattccacccgactggcagaacttacgaccctcacctaatctgagatcctcccccaactctcgtgcctcacagaaccagggtcctccacagccccgagatgtggcccttcttcaggaaagagcaaataagctggtcaagtacttgatgcttaaagactacacgaaggtgcccatcaagcgctcagaaatgctgagagatatcatccgagaatacactgatgtttatccagaaatcattgaacgcgcatgctttgtcctggagaagaaatttggaatccagctcaaggaaatcgacaaagaagagcatctgtatatcctcatcagtacccctgaatccctggctggcatactgggaacgaccaaagacacaccgaagctaggcctcctcttagtgattctgggcattatcttcatgaatggcaaccgtgccactgaggccgtcctctgggaagcactgcgcaagatgggactacgtcctggggtcagacatcccctccttggcgatctgaggaaacttcttacttacgagtttgtaaagcagaaatacctggactacagacgagtgcccaacagcaaccctcctgagtatgagttcctctggggcctccgctcctaccatgagactagcaagatgaaagtgctgagattcattgcagaggttcagaagagagaccctcgtgactggactgcacagttcatggaagctgcagatgaagccttggatgctctggatgctgctgcagctgaggcagaggcccgggccgaagcaagaaaccgcatggggattggagacgaggctgtgtctgggccctggagctgggatgacattgagtttgagctgctgacctgggatgaggaaggagattttggagatccttggtccaggatcccctttaccttctgggccagataccaccagaatgcccgctccaggtttccccaggcctttaccggccccatcattggccccagcggcactgccaccgccaacttcgccgccaacttcggtgccattggcttcttctgggttgagtaaagtgtcagatactgctcatcatttgcaatagttttccctgagtgaggctgaagcctcagattccttcaaaacacagctatctagagagccacatcctgttgactgagagtggcatgcaagataaatttatttgctattctgtctattacttttttttccttgtgtgttgtcaagttttggtatcagaaataaatgttgaaattgcaaagtgaaaaaaaaaaaaaaaaaaa

SEQ ID NO: 3763 - DNA, 2065 bp, Rattus norvegicus
  Genbank Accession No. NM_053410
atttctggatccaaaatggacgttcctagctcctccagctcccgattctcggtcggctctgccagccctagcagtgtgctcctctatgcgaaagacctcaaaaagtgggatgagtttgaagacctgttggaggagaggagacaggtcagtgatttcaaatttgcaatgaagtgctacacaccacccttgtatagaggaattactccctgcaagccaagtgatatcaagtccatcgttctcaattctgaagagattaactatgtcattaagcagctttccagggagtccctgacgggtgtggatgtgctcagagaagaggccaatgagatcctggaggaaatgagtcacaaactgcgtataggagccattcggttctttgcctttgttctgagcaaagtttttaaacagatcttctcaaaggtgtgtgtgaatgaagaaggcattcaaaagctacaacgagcgatccaggagcaccccgtgatcctgctgcccagccaccggagctacatcgacttcctcatgctgtcctttgtcctctacaactatgacctgcccgtgccggtgatcgcagcagggatggacttcctgggaatgcgagtggtgagcgagctgctcaggatgtctggggccttcttcatgcgacgtacttttggaggaaataagctctactgggccgtattctcggaatacgtgaagaccatgctacggagtggttatgctcctgttgaatttttcctcgaagggacaaggagtcgagctgccaagaccttgactcctaaattcggtctcctgaatattgtgatggaaccattttttaaaagagaagtttttgatacctactttgtcccaattagcatcagttatgataaaatattggaagaaagtctttatgcgtatgagctcctaggaatccctaagccaaaggaatccactaccggactgttgaaagctagacggattctctctgagaactttggaagtatccatgtgtactttggagaccctgtgtcactgcgctctctagctgcagggcggctcagtcggaacacgtataacttggtgccaaggtgcatccctcagaagcagcctgaggatgtgcaagcctttgtcactgaagttgcctataagatgcagcttttgcaaattgaaaacctggctctgagcccatggcttctggtagttgccattctgcttcagaaccagctgtgcatggacttcgatgccctggtggaaaagactctgtggctgaagggcttaacgcaggtgtttggagggttcctgctttggcctgataacaaacttcctgaggaagtggtccagtcgagcatcctcctgcactctaacctggccacccttgtcaaagaccaggtggttctgaaagtggactctgaaagctcacagatggtcaacgggcttgtgccccaacacattgccttcctcatgtgctcggcgtacaggaaccagctgctcaacgtgtttgcccgtccttccctagtagctgtggctttgcacatgactcctgggctcaggaaagaggatgtcttcagttgcttttccttcctccgcaacgtgttttcagatgagttcatcttccttccaggaaacacactcagggactttgaggaaggctgttacttgctgtgtaaaactgaggttatgcagatgactgggaaggacatcatcctcacagacaaagggaatgctgtattacagttcctcacaggactctttaaaccttttgtggaatcgtatcagatactttccaaatgcctcttgcatgaagaggactacttcagtgagaaggagtacttggtcacagccaggaagttcacccgccagcttctggatcaagatgcctctcagtgttacgacgcgctgtcctctgaacttcagaagaatgccttagcagccttcgtgagactcggggtggtagaaaagaataaggtagacagtaaatatgtgtattatgtcaacgggcctgccacaagcaagttagaagaaatgctcggatgtaagaagccaataggaaaaccagccactgcaaaactttaaaagcttagaaatc

SEQ ID NO: 3764 - DNA, 1751 bp, Rattus norvegicus
  Genbank Accession No. NM_053437
gaagattgggccgcgacgaggtgcgggccgaagccatgggcgaccgcggaggcgcgggaagctctcggcgtcgcaggaccggctcgcgggtttccgtccagggaggtagtgggcccaaggtagaagaggacgaggtgcgagaagcggctgtgagccccgacttgggcgccgggggtgacgcgccggctccggctccggctccagcccatacccgggacaaagaccggcagaccagcgtgggcgacggccactgggagctgaggtgccatcgtctgcaagactctttgttcagctcagacagcggtttcagcaattaccgtggtatcctgaattggtgcgtggtgatgctgatcctgagtaatgcaaggttatctttagagaatcttatcaagtatggcatcctggtggatcccatccaggtggtgtctctgtttctgaaggacccctacagctggcctgccccatgcttgatcattgcatccaatatctttattgtggctacatttcagattgagaagcgcctgtcagtgggtgccctgacagagcagatggggctgctgctacatgtggttaacctggccacaattatctgcttcccagcagctgtggccttactggttgagtctatcactccagtgggttccctgtttgctctggcatcatactccatcatcttcctcaagctttcttcctaccgggatgtcaatctgtggtgccgccagcgaagggtcaaggccaaagctgtgtctgcagggaagaaggtcagtggggctgctgcccagaacactgtaagctatccggacaacctgacctaccgagatctctattacttcatctttgctcctactttgtgttatgaactcaactttcctcgatccccccgaatacgaaagcgctttctgctacggcgggttcttgagatgctctttttcacccagcttcaagtggggctgatccagcagtggatggtccctactatccagaactccatgaagcccttcaaggacatggactattcacgaatcattgagcgtctcttaaagctggcggtccccaaccatctgatatggctcatcttcttctattggcttttccactcatgtctcaatgctgtggcagagctcctgcagtttggagaccgcgagttctacagggactggtggaatgctgagtctgtcacctacttttggcagaactggaatatccccgtgcacaagtggtgcatcagacacttttacaagcctatgctcagactgggcagcaacaaatggatggccaggactggggtcttttgggcgtcagctttctttcatgagtacctagtgagcattcccctgaggatgttccgcctttgggcattcacagcaatgatggctcaggtcccactggcctggattgtgaaccgcttcttccaagggaactatggcaatgcagctgtgtgggtgacactcatcattgggcaaccggtggctgtgctcatgtatgtccacgactactacgtgctcaactatgatgccccagtgggggcatgagctactgccaaaggccagcctccctaacctgggcctggagttctggagggcttcctgctgctgcacactcccctagtttggaggcctttctgcccctatggggcctactcctgctcttggggatggccctgagccagctggttgagccagtgctgggagtttgtgctgaccaggggcttaggatatcaataaagagctatctaaaaaaaaaaaaaaaaa

SEQ ID NO: 3765 - DNA, 3258 bp, Rattus norvegicus
  Genbank Accession No. NM_053438
cgacggccgtggcctgcagaggcggcagggacggtggccgcggttggcgcgcgcatccgcacggggctagtccccgcgcagctacgcaactgacaggaagcctccctggagagccgcgtcggggcctagtgttatttgctttttgctttttctcccccttcacgactgtggtctcgcgctcttccgcagcgggagccgccgcgacgccccctcgcgggccgccggcctgagaggcgccgcccgcgggaacctggagccgccgccgggcctgggcggccgccggggcctgaagcctgggcgttcggcgcggcgctgcgacgaccgctccaacccgcgctgggcgcgccgggccccaggcctggcccagccgagcaccgcgccttccggactggggccacgtagtccggcgccaaccgccctccgctggcccgcagtctatcggagctgcctcctggtcacccctggtgggctcttgccctcttccagccttccgcagttcgatgggtggagtgcttttgaacgtgccctcttctccctttctcagctcttgaccgcaaggccagagccggggccctcagccgcacgcacgcagcgatccacctgcctccccgcggggatggcccgcgggtgccgccaccgccgcgcgccctcgctgccctcgccgccctcgccaggctacgctcgtcgccccgcactcgaccccctcttcttgtccacggcgtcccggctcccggcgacgccaagagggcgaagatgtggctgaagctgtttttcttgctcctgtatttcctggtcctgttcgtcctggccaggttttttgaggccattgtgtggtacgagactggcatctttgctactcagctggtggatccggtggcattgagcttcaagaagctgaagaccattctggagtgtcgagggctgggctactccggactacctgagaagaaagatgtacgggagctggtggagaagtcaggtgacttgatggaaggtgaactctattctgctctcaaggaagaagaagcatctgagtctgtttctagtaccaatttcagtggtgaaatgcatttctatgagcttgtagaagacacaaaagatggcatctggctggttcaggtcatagcaaatgacagaagtcctttggtgggtaaaatccactgggagaaaatggtaaaaaaagtgtcaagatttggaatacggacaggcactttcaactgttccagtgatcccaggtactgcagaaggagaggctgggtacgttccactctcatcatgtctgtcccacaaacaagcacatctaaagggaaagtcatgcttaaagagtacagtgggcgcaagattgaagtagaacacatttttaaatggataactgcccatgcagcttctcggatcaaaactatatataatgttgagcatttgaaagaagaatggaataaaagtgatcagtactgggtaaaaatatacctgtttgcaaaccttgaccaaccaccagctttcttctctgcattaagtataaaatttactggaagagttgagtttatttttgttaatgtggaaaattggaacaacaagagttatatgacagatattggtatttataacatgccgtcatacatacttagaactcctgaaggaatttacagatatggaaatcacacaggtgaatttatatcccttcaggccatggattcatttttacgctcattacaacctgaagtaaatgatctgtttgttttgagtttggttctagttaatcttatggcttggatggacttatttattacacaaggagcaaccatcaagcgatttgtggttctcataagcactttagggacatacaattccctattaattatttcttggctacctgtgttgggctttctacagctcccttacttagatagcttttatgaatatagtttaagattgctgcgatactctaatacaaccacactggcttcgtgggtaagggcagactggatgttttactcttcacacccagccctgtttctcagtacataccttggacatggtttgctaattgattactttgagaagaagagacggcgcagcaacaatgatgaagttaatgcgaataatttagagtggttatcaagtctgtgggactggtacaccagctacctcttccacccgattgcttcttttcagaactttcctgtagactctgattgggatgaagaccctgacttattcttggagcggttagctttccctgacctttggcttcaccctctgataccaactgattatattaaaaacttaccaatgtggcggtttaaatgtcttggggctcagtctgaagaagaaatgtcggagagttctcaagacactgaaaatgactcagatagtgacaacacggacacttttagtagtagtaaggatgtatttgaagataaacaaaatgttcacagttctccaggaagaacaagtcgctgcgatactgaggcttgttcatgtgccaataaatgtgtcagcagcccatgtgaaaggaagaggaggtcatatggctcacataatactaaggaagatatggagccggactggctaacttggcctgctggtacgctgcactgtactgaatgtgttgtttgccttgagaattttgagaatggatgtttgctgatggggttgccttgtggtcatgtgtttcaccagaattgcattgttatgtggttggctgggggccgacactgttgccctgtttgccgttggccttcatataagaaaaagcagccatatgcacagcaacagccgttgtcaaatgatgctccatcttgaccatgtgcaagttgtccaataagctttgagtatcttacagcttgcctttttaatgttagtcacaatgtttttgtggtttgaagtttagtttaatgttagtgcagtgacaggaaatacacattatgctgatgttgatgacagaatttatttggatgccttgtgtgtcaattgaatgcatactaaactgtaaaaaaattatttacagcattgaaaattcagaagttaatggttttttgtaagcacaaaagaagtatggtagaaatttatcttagcaagactttatgaggcaggatcaaatcctagtgggcctgagctgatttcttaccctaaatgttttttccctttttacaatctctgtccagcacctcttggttaaataatgtatgctctgagacatgaaattaaaacagatctataaaataaattattttaaaagcaaaaaaaaaaaaaaaaaaa

SEQ ID NO: 3766 - DNA, 1084 bp, Rattus norvegicus
  Genbank Accession No. NM_053439
catctttccagcttcagtcggacaggcgcggagactcttctggaagccgctctctcccgcaggatcgccgcgatggccgcccagggagagccgcaggtccagttcaagctcgtcctggtgggcgacggcggcaccgggaagacgacgttcgtgaagcgccacttgacgggcgagtttgagaagaagtatgtagccaccctgggcgtggaggtgcacccgctcgtcttccataccaacagaggacccatcaagttcaacgtgtgggacacagccggccaggagaagttcgggggcctgcgcgatggctactacatccaagcccagtgtgccattataatgtttgacgtaacatcaagagttacttacaagaacgtacctaactggcatagagatctggtacgcgtgtgtgaaaacatccccattgtattgtgtggcaacaaagtggatattaaagacaggaaagtgaaggcaaaatctattgtctttcaccgaaagaagaatcttcagtactatgacatttctgccaaaagtaactacaactttgaaaagcctttcctctggcttgccagaaagctcattggagatcctaacttggagttcgttgccatgcctgctcttgccccacctgaggtggtcatggacccagctttggcagcacagtacgagcatgatttagaggttgctcagacgactgcgctcccggatgaggatgacgacctgtgagaaaatgaagctggagccctgcgtcagaagtctagttttataggcaactgtcctgtgatgtcagcggtgcagcgcgtgtgccaccttatttagctaagcagatcgtgtacttcattgggatgctgaaagatgaatgggcttcgagtgaatgtggcagttaaacatacccgtcattttttggacttgcatatttagctgtttggaacagagttgtttccttcctgaatttcaaagataagactgctgcagtcgcatcacaatattcagtggtgaaatcttgtttgttactgtcattcccattcttttcgtttagaatcagaataaagttgtatttcaaataatctaaaaaaaaaaaaaaaaa

SEQ ID NO: 3767 - DNA, 2303 bp, Rattus norvegicus
  Genbank Accession No. NM_053463
cgatgcctacctctgtgccccgcggggcgcctttccttctcctaccacctttactgatgctgtctgctgtgctggcagtgcctgtggaccgcgcagcacctcatcaggaggacaaccaggccactgagaccccggacacaggcctgtactaccatcggtacctccaggaggtcatcaacgtgctagagacagatgggcacttccgggagaagctgcaagctgccaacgctgaggacattaagagtggaaagctgagtcaagagctggacttcgtcagccacaacgtccgcaccaagctggatgagctcaagcgacaggaggtatcaaggcttcggatgctgctcaaggccaagatggatgcaaagcaggagcctaacttgcaggtggaccacatgaaccttctgaagcagtttgaacacctggaccctcagaaccagcacacgtttgaggctcgggacctagagctgctgatccagacggccacccgagacctcgcccagtatgacgctgcacaccatgaagagttcaaacgctacgagatgctcaaggaacatgagcgaagacgttacctggagtctctgggagaggagcagcggaaggaggctgagaggaagctacaagagcagcagcgcagacaccgggaacaccccaaagtcaatgttcctggcagccaagcccagttgaaggaggtgtgggaggagctagatggattggaccccaacaggttcaaccccaagaccttcttcatactgcatgacatcaacagcgatggtgtcctagatgagcaagaactggaagctctgtttaccaaggagctggagaaggtgtacgacccgaagaacgaggaggacgacatgagggagatggaggaggagcggctgcgcatgcgggagcatgtgatgaagaacgtggacaccaaccaggaccgacttgtgaccctggaggaattcctggcatccacacagaggaaggagtttggggaaactgcggagggatggaagacagtggaaatgtatccagcctacacagaggaagagctgaagcgttttgaagaggagcttgctgcccgggaggctgagctaaatgccagagcccagcgcctcagccaggagacagaggccctggggcgctcccaggaccgcctagaggctcagaagagagagctgcagcaggccgttctgcagatggagcaaaggaagcagcaacagcaagagcagagcgctccgccttcccaacctgatgggcagctgcagttccgtgcagacacaggggatgctcctgtcccagctccagcaggtgaccagaaagacgtgcctgcttctgaaaagaaggttccagagcagccccctgtgctgccacagctggattctcagcatttataagccctcagagatcccggccctcaagttcccacagacagtgatggaagctggatgaagtgtccttgcagcctttctggagaccaaagccttcatggcctccaggggagaacagggccaccctgttcctcagatgcgcttctgcccatgtctaccagtctgttctcacagcctctgggtcccagtcctgccttcctccctcccttccttggcagggactcaactgcaggagcccctcaccccacctgagtgcacaccccaggcctgcctgccttccatgctttgctcttacctgtcccaggctcaacctttctgcttcctgtacctgtcagtgggtcacaggagcttgacttggtctctccaactctttgccttgtgagaggccaatgatctcaattccttttggtggctagaggccgccacaatgtggggtgtcctatcagctctgcctgggactcctgaactccaccaccaccccaccagccttaccctaaccacctgggcccaatacctacctgagggtcccagaaggggcccagatatggctacaccccttactgaggtccagcctcactcagccccctatgggggctcctgaaaattggttcacccacttccctggcttcaggccacactgctgtgtcctgctctgtgtcccagtctcatccaactatagcctggcacaaataaacattagcatatctgtgtgaatgtactgccctcttgcaagtccccctgcatgccacctgctcgactccctggtgtcctgtggcacatacttccactgccaggaggcttgccgggggctttctgtgtgctcttgccagaatggcctccttgcttcatttttgccatggaaacagaaaacccaaacctgagcttgaaaaaaaattaatatcttaaataattaaaatatatatatgt

SEQ ID NO: 3768 - DNA, 1268 bp, Rattus norvegicus
  Genbank Accession No. NM_053464
gaggttgtgctggggctccgcgcggcctgcagtcccgggcccgcgacgcgcgccgcccgcccgccatggagcctggccccgacggcccagccgcgcccggccccgccgccatccgtgagggttggttccgagagacctgcagcctgtggcctggccaggccctgtcgctgcaagtggagcagctgctgcaccaccggcgctcgcggtaccaagacatcctcgtcttccgcagtaaaacctacggcaacgtgctggttctggatggcgtcatccagtgtaccgagagggacgagttctcctaccaggagatgatagccaacctgccgctctgcagccaccccaacccgcggaaggtgctgatcatcgggggtggagatgggggcgtcctacgggaagtggtgaagcacccctctgtggagtctgtggtccagtgcgagatcgatgaggatgtcattgaggtctctaagaagttcctgcctggcatggccgttggctactccagctcaaagctgactctccacgtgggcgatggctttgagttcatgaagcagaaccaagatgcctttgatgtcatcatcaccgactcctcagaccccatgggccctgctgagagcctcttcaaggagtcctattaccagctcatgaagacagccctcaaagaagatggcatcctctgttgccagggcgagtgccagtggctgcacctggacctcatcaaggagatgaggcatttctgcaagtctctcttccctgtggtgagctatgcctactgtaccattcccacctatcccagtggccagatcggcttcatgctgtgtagcaaaaacccgagcaccaacttccgggagcccgtgcagcagctgacacaggcccaggtagagcagatgcagctgaagtactataactcagacatgcaccgcgcggccttcgtgctgccagagttcacccgaaaggccctgaatgacataagctgaatccagtgccactgtaacaccacccgagacctcagttggattggaccaaggagcttccaagctgtctgggaccaccagtcctggaccaaactcccagatgactcttgcccaccaaccaagtgttacaggccccagaatgctgcctggcctgccctgctgggtggactcagtctctgtgtctgtctatctctgtggcgttcagccccacgcctataccagctctgtacagcaccacctatgccctgtgacccaacaaaaaacacgtgtatttataacaaaaaaaaaaaaaaaaaa

SEQ ID NO: 3769 - DNA, 1314 bp, Rattus norvegicus
  Genbank Accession No. NM_053467
atgtctggtttgtctggcccactatcctggcctggccctctcctatccgccttgctctttctgttccttctcggccccagctcggtcctcggcatctccttccatctacccgtgaactctcgcaagtgtctccgcgaggagatccacaaagacttgctggttacgggcgcgtacgagatcaccgaccagtctgggggcgctggcggcctgcgcacccacctcaagatcacagattctgctggccatattctgtatgccaaagaggatgcaactaaagggaagtttgcctttaccacagaagactatgacatgtttgaagtatgctttgagagcaagggaacagggcggatacctgaccaactagtgattctagacatgaagcatggagtagaggcgaaaaattatgaagagatcgcaaaagttgagaaactcaaaccactggaggtggagctacggcgcctcgaggacctttcagagtctattgttaacgactttgcctacatgaagaagcgggaagaggagatgagggacaccaacgagtccacaaacacccgcgtcctgtacttcagcatcttttccatgttctgcctcattggactagccacctggcaggtcttctacctgcgtcgcttcttcaaggccaagaagttgatagagtaatgaggctcagtcttctgtcccctggagccagcagaacatcgctgggacgtgcctggcctagcccaaggccaagttactaacagtatatcaaggcgcacgtgagcatcttgccagaactgatccttctggtgtgggagagcatgggcaccacccacacccagcaagtcagagaggactttttaatgcagtaggatttggactggtttgcaacaagattattaaagtcgcctatggaaaaacaaaacaaaacaaaacaacaaacaggggttacctagataacgccaaagccagcattcgtcctgggtcgcctcacaggatcggtttgagctgtttgctttttctctcccacttgctcaccgccttggtcctccactctagttctcctccaagatttctctgacctcggtcagctccttcatatcagttgtctctttggtttccttgtgaaacaccttgaacttctcttggtccttagatgaaatgtttacagagcttctggtgatatccttcataattttatgtcttctaaaagggtcatgggtgggacacaaaacaaagtgagctttgaactgtagataatctcttaaaagaaaatctcattttagaccattaaaatgtttgtgctcaaaaaaaaaaaaaaaaaaaaaaaaaaaa

SEQ ID NO: 3770 - DNA, 367 bp, Rattus norvegicus
  Genbank Accession No. NM_053469
cacgagggcaggacagaaggcaagatggcactaagcactcggatccaggctgcctgtctcctgcttctcctcctggccagcctgagcagcggtgcctatctccggcaacagacgagacagactacggctctgcagccttggcatggggcagaaagcaagactgatgacagtgcgctgctgatgctgaagcgaaggaagcgagacaccaacttccccatatgcctcttctgctgtaaatgctgtaagaattcctcctgtggtctctgttgcataacatagagagccaagagccttgtcctgacctctcaacacactgcctcccctccgccccattatttattcctgtcctaccccagcaatgaccttg

SEQ ID NO: 3771 - DNA, 704 bp, Rattus norvegicus
  Genbank Accession No. NM_053472
ccgccgtcttcagcttgcaactatgttttccagagctacccggagtctggtaatgaagacaggaggactcagaactcaagggacacacagcccaggaagtgctgctagcagcagccagcggaggatgaccccctatgttgactgctatgctcagcgctcctatcccatgccggatgagccttactgcacagagctcagcgaggagcagcgggccctgaaggagaaagagaagggcagctgggctcagctgagccaagcagagaaggtggccttgtaccggctccagttccacgagaccttcgcagagatgaaccatcgctccaacgaatggaagacagtaatgggctgcgtcttcttcttcattggattcacggctctggtgatttggtggcagcgggtctatgtgttccctaagaaggttgtcaccctgacggaagaacggaaagcccagcagctccagcgcctcctggacatgaagagcaaccccatacagggcctgtctgcccactgggattacgagaagaaagagtggaaaaagtgaccaacatcacagtctgctgcctgcccttgcaaaccgattccgcttccgcagcctaggagaccctcctctcctctcttctcctcccttcccctcccccacctcctgtcttgtctcctccattcccttctgctccaataaaagcagcctgcattgttctgcctgc

SEQ ID NO: 3772 - DNA, 1095 bp, Rattus norvegicus
  Genbank Accession No. NM_053475
aaattgcaagcgtattcttttaatgactccagtaaaattaagcatcaagtaaacaaaagtggaaaagaacctacacttttaacttgtctcactagtgcctaaatgtagtttaaaggctgcttaaattttgtgtgtagttggattttttggaagctgaaggtatccatctgcagacattgaggcccaagttgaatttggattcgagtggattcttaacacttctgcctgtgctgaagagaagcttcataaggaacaagcaagttgaatagagaagatagtgatcaataagaggcatttagtggtctttttaatgttttctgctgcgaaacatttcaagatttattgatttttttttttcattttccccaccacactcacacacgcacgctcacactttttatttgccataatgaaccgtccagcccctgtggagatctcgtacgagaacatgcgttttctgataactcacaacccagccaatgcgactctcaacaagttcaccgaggaactcaagaagtacggagtgacaactttggtccgagtttgtgatgctacctatgacaaagctccagttgaaaaagaagggatccacgttctagactggccatttgatgacggagctccgccccctaatcagatagtagatgattggctaaacctgttaaagaccaaattccgggaagaaccaggctgctgtgtcgcagtgcattgtgttgcaggattgggaagggctcctgtgctagttgcacttgcactgattgaatgcggaatgaagtatgaagatgctgttcagtttataagacaaaaaagaagaggagcattcaattccaaacagctgctttacttggagaaataccgacctaagatgcgattacgctccagagataccaacgggcactgctgtgttcagtagaagcagaggaaggccggctggatcgtggcattagagggaactctgggtacctggaaatgtgaatctggattcttacctgtgtcatcaaagtagtgatggattccgtactcctcgactcctcatgattgagaagaaggcaaacgataaagaaatccctctataacacgaataaaatgtttaag

SEQ ID NO: 3773 - DNA, 291 bp, Rattus norvegicus
  Genbank Accession No. NM_053485
cagtggtcagtcatggcatgccccctggatcaggccatcggccttctcgtggctatcttccacaagtactctggcaaggagggtgacaagcacaccctgagcaagaaggagctgaaggagctgatccagaaggagctcaccattggtgctaagctgcaggatgctgaaattgcaaggctgatggatgatctggaccgtaacaaggatcaggaagtaaacttccaggagtatgttgccttcctgggggccttggctttgatctacaatgaagctctgaaataaaatgggaag

SEQ ID NO: 3774 - DNA, 1194 bp, Rattus norvegicus
  Genbank Accession No. NM_053487
agagagagagagagagagagagagagagagaacccacccacccggcgactaatctgatcccggctgtcccccgggaccagcgaggtcccagaagacccacgagggagcgggcgtaacgcgtggctgcgggtgggagccatggacgccttcatccgagtcgccaaccaaagccaaggtcgggaccgacttttcagagccactcaacacgcatgcatgttgcttagatatttgttagagtctaaggctggcaaagaggcggtggtaacgaagctcaagaatctggagactagtgtgagcactggccgtaaatggttcagactaggcaacgtgctccatgccatccaggccactgagcagagcatccaagccactgaccttgtgccccgcctatgcctaacattagccaacctgaaccgcgtggtttattacatctgtgacactgtcctctgggcgaagagtgtgggtctgacatctggaatcaacagagagaagtggcaaatgcgggcggcccgccactactactatttcctcttgctgagcctggtccgggatctgtatgaggtcttgctgcatatgggacaagttgcacgcgacagagcaaagagagagaagtcctccggggaccctcctaagtacagcgtcgctaatgaagaaagtgaatggctccagtccttcctcctcctcctcttccagtctctaaagcgaaatccgcccttattcctggacaccgtgaagaacttctgtgacatcctgatccctttgaaccagctcgggatctacaagtccaaccttggcgtggtaggatttggaggtctcgtgtcctctgtggctggcctcatcactgtggtgtatcctcagttgaaactgaaggcccgctagggtgtttggaaaatttaagactgacgttcagtggagcaaacatttgcttttgtcatgatgtctactgtacttaattttttttaatcatgtgagcatcttaccaaccggtgatgtgagcagaggtaggacccacaacggagcctgaagactgatgacgtttttgtaaacacggcagtaacttctgcacatttccccttcagtgacttctgactactgcaaaaacatttgtgccgtcattgaagacgtgtaaaggggaagtcagaacattgctgagcatcttttctgtacatagtaagagctcatatatctaacaaa

SEQ ID NO: 3775 - DNA, 2737 bp, Rattus norvegicus
  Genbank Accession No. NM_053491
ctgggacacagttgtccaggtgctgttggccagtcccaacatggaccataaggaaataatccttctgtttctcttgtttctgaaaccaggacaaggggactcactggatggctatgtaagcacacagggggcttcactgcatagcctcaccaagaagcagctagcggcaggaagcatagcagactgtttggccaaatgtgaaggggaaacagacttcatctgcaggtcattccagtaccacagcaaagagcagcagtgcgtgatcatggccgagaacagcaagacttcctccatcatccggatgagagatgtcatcttattcgaaaagagagtgtatctgtcagagtgtaagactggcatcggcaagggctacagaggaaccatgtccaagacaaagactggtgttacctgtcaaaagtggagtgacacgtccccccacgtacccaaatactcccccagcacacaccccagcgagggactagaggagaactactgtaggaacccagacaatgatgaacaagggccctggtgctacacaacagacccggaccagagatatgagtactgcaacatccccgaatgcgaagaggaatgcatgtactgcagtggagaaaagtacgagggcaaaatctccaagaccatgtctggactcgactgccagtcctgggattctcagagcccacatgctcacggatacatccctgccaaatttccaagcaagaacttgaagatgaattactgtcgcaaccctgacggggagccgcggccctggtgcttcaccacagaccccaacaaacgctgggaatactgtgacatcccccgctgcacaacacccccacccccaccgggcccaacctaccaatgtctgaaggggagaggtgaaaattaccgagggaccgtgtctgtcactgcgtctgggaaaacctgtcagcgctggagtgagcaaacacctcataggcacaacaggacgccagaaaacttcccctgcaaaaatctggaagagaactactgccggaacccagatggagaaactgctccctggtgctataccactgacagccagctgaggtgggagtactgtgagattccgtcctgcgggtcctcggtatcaccagaccagtcagattcctcagttcttccggagcaaacacctgtggtccaggagtgctaccagggcaatggaaagagctatcggggcacatcgtccactaccaacacagggaagaagtgccagtcctgggtatctatgactccacatagtcactcgaagaccccagcgaacttcccagatgctggcttggagatgaactactgcaggaacccagataatgaccagaggggcccttggtgcttcaccactgacccgagcgtcaggtgggaatactgcaacctgaagcggtgctcggagacaggagggggtgttgcggaatcagccatagtcccccaagttcccagtgcgccaggcacctctgagacagactgcatgtatgggaatggcaaagaatatcggggcaaaacggccgtcactgcagctggaaccccctgccaggaatgggctgcccaggagccccacagtcacagaatcttcaccccacagacaaacccacgggcaggtctggaaaagaattactgccgaaacccggatggggatgtcaatgggccctggtgctatacaatgaaccccagaaaactttacgactattgtaacattcccctttgtgcatcattatcgtcctttgaatgtgggaagcctcaggtggagccgaagaaatgccctgggagggtggtgggtggctgtgtggccaaccctcactcctggccctggcaaatcagccttagaacaagattttctggacagcacttctgtggcggtactttaatatccccagagtgggtgctgactgccgctcactgcttggagaaatcttcgagacctgaattctacaaggttatcctgggagcacacgaagaacgaatccttgggtcagatgttcagcaaatagcagtaaccaaactggtcttggaacccaacgacgctgacattgccctgctgaagctaagccgcccagccaccatcacagataatgtcatcccagcttgtctgccatctccaaattatgtggttgccgaccggacactgtgttacatcaccggctggggagaaacgaaagggactccaggtgccggccgtctcaaggaggcccagctgcccgtgatcgagaacaaggtgtgcaaccgcgctgagtatctaaacaacagagtcaaatccaccgagctctgtgccgggcatctggctggtggcatcgacagttgccagggcgacagtggaggacctctggtttgcttcgagaaggacaagtatattttacaaggagtcacttcttggggtcttggctgtgctcgccccaataagcctggtgtctatgttcgtgtttcccggtacgttaattggattgaaagggagatgaggaatgactaattgggtgggaggcagaacaaaactactaaatatggggaggggattagggcgcttgaaaaaaaacctgacagcaatcaaaccaaagacactacactggaccactacttcctgtcacccctcagctcctccctctttttgtattattgtgggtaaaattttcctgtccctggacttctggattttgtgacaatagaccatcacttctgtgacctttgttgaaaataaactcgatacttactttaaaaaaaaaaaaaaaaa

SEQ ID NO: 3776 - DNA, 645 bp, Rattus norvegicus
  Genbank Accession No. NM_053507
catgatctgtctggtgctgaccatctttgctaacctcttcccctcagcctacagcggcgtgaacgagcgcacgttcttggcagtgaagcccgacggcgtgcagcggcggctggtgggcgagatcgtgcgtcgctttgaaaggaagggcttcaagctggtggcactgaagctagtgcaggcctccgaagagctactgcgggagcattatgtcgagctgcgggagagacctttctacagccgattagttaaatacatgggctctggtcccgtggtggccatggtgtggcaagggctggatgtcgtgcgcgcttcgcgggccctcataggggccactgacccaggggacgccacgcccggtacgatccgtggtgatttctgtgtggaggttggcaagaatgtgattcatggcagtgattcggtggaaagtgctcagagagagatcgctctttggttccgtgaggatgagcttctgtgctgggaggacagcgcgggacactggctatatgagtagacgctaaaatcaacattaccaatctggaggttgttggtcttctgtgatcttcacagtgacagtgctatgtgggtgcaggtccacccaacccagtctgtccaggggcaaccacttccacatcccaccctctattt

SEQ ID NO: 3777 - DNA, 965 bp, Rattus norvegicus
  Genbank Accession No. NM_053512
gggcaggtgttttcgtgctcgcttggtcatggaaacgtggtccaagctgctggacgggaccacgccgtcccgtcgctggcgaaagctggtattgctcctgccgcctctgctgctgttcctgttacagactgaagctttgcagggcttggagagtgatgatcggttccggacccgcgaaaatgagtgccacttctacgctggtggacaagtgtaccccggagaggtgtcccgggtttcggtcgcagatcactccctgcacctaagcaaagccaagatttccaagccagcaccttattgggaaggaacagctgtgataaacggagaattcaaggagctcaaattgaccgactatcgtgggaaatacttggtttttttcttctacccactggatttcacctttgtgtgtccaactgaaatcatcgcttttggggatcgaattgaagaattcaaatctataaatactgaagtggtagcatgctctgttgattctcagtttactcacttggcctggatcaatacccctcgaagacaaggaggactggggccaataaggattccacttctttcagacctgaaccatcagatctcaaaggactacggtgtataccttgaggactctggacatactcttagagggctctttattatcgatgacaaaggagtcctaagacagattactctgaatgaccttcctgtgggtagatcagtggatgagacactgcgtttggttcaagccttccagtacactgacaagcatggagaagtctgccctgctggctggaaacctggtagtgaaacaataatcccagatccagctggaaaactgaagtatttcgacaagctaaactgaaaagtacttcagttatgatgcttagaccttctcaataaaggtcattgtgttaattaccataaaaaaaaaaaaaaaaaaaaaaaaaaaaaaaaaaaaaaaaaaaaaaaaaaaaaaa

SEQ ID NO: 3778 - DNA, 660 bp, Rattus norvegicus
  Genbank Accession No. NM_053514
atggcgacattgacagtggtccagccgcttactctggacagagatgttgcaagagcaatcgaactactagaaaagccacaagaatccggagaagtaccagtgcacaagctgcagtctctcaaaaaggtgcttcagagtgagttttgtacagcaatccgagaggtgtatcaatacatgcatgaaacgattactgttaatggctgccctgaattccgtgcgagggccacagcaaaggcaacagttgcggcttttgcagccagcgaaggccactcccaccctcgggtagtcgaactgccaaagactgatgaaggcctgggttttaacgtgatgggaggaaaggaacagaattctccaatttacatctcccgcatcatccctggaggggtggctgaaagacacggaggcctcaaaagaggagaccagttgctatcagtgaacggagtgagcgtggaaggggaacatcacgagaaagctgtggaacttctcaaggctgctaaggacagtgtgaagctggtcgtcagatacaccccaaaagtcctggaggagatggaggctcgttttgaaaagctgaggacagctcggcgtcggcaacagcaacagttgcttattcagcagcagcagcagcagcagcagcagccacaacaaaaccacatgtcatag

SEQ ID NO: 3779 - DNA, 1876 bp, Rattus norvegicus
  Genbank Accession No. NM_053516
cggtaattatcgcaattcctacaggcgtaaaagtattcagctgactcgctacactacatggaggaaatatcaaatgatcccccgccatattatgagccttagggtttatcttcttattcacagtagggggcctaacagggatcgtactatctaactcatcccttgacattgtacttcatgatacatactatgtagtagctcacttccactatgtcttatctataggagcagtattcgccatcatagctggcttcgtccactgattcccactattctcaggctataccctaaatgacacatgagcaaaagcccactttgccattatatttgtaggtgtaaacataacatttttccctcaacacttcctagtattagcggggatacctcgtcgttactctgattatccagatgcttacaccacatgaaatacagtctcctctataggctcattcatctcacttacggccgtccttgtaatgatcttcatgatttgagaagccttcgcatcaaaacgagaagtactctcaatttcctactcctcaactaacctagaatgactgcatggatgccccccaccctaccacacattcgaagaaccttcctacgtaaaagttaaataagaaaggaaggattcgaaccccctacaactggtttcaagccaatttcataaccattatgtctttctcaataaaaaaaaaaaaaaaaccacttccttccttcccaggctaccgggaccgcagctatgaccctccatgcccaggccactggacgccagaggcacccagttcagggaccacatgtcctgggctgcccagagcttcagaggaagaggagatcggaggtcctgaggactctgaggcagtacagcctcgaacaccagaggagccagaactagaagctgaagctactaaaggggatgagccagacctggaacaagaaatggaaccagaaccagagccagaggtagaaccggagccagagccggagccggagccggagccggagccggagccggagccggagccggagccggagccagagcgagagcctgacttccaagaaggggatgagtctgaaggttgtgagaacacctaaaccctagcttgcaggcttgttagaaattgtggactgggaagtaggggttgatccccactccactgaccatcattttcatctctagattcttgaaggccagaatatccttacctgtccaaatctgattcaagctggataagatctggaaacctgccagaactggaccaagtcaatgcagcaagactccatttactgccaaatgagtaaactcgggagggttagcctggacctgattcttcacaactcaggctctttactcaagaatggtctgaatcccactgacctgagcaggcttgtgtgaaaaataccatcccccccaccaacagtattccactcccaaagtagcccaagctgtatttctagagatcttagattcaggcccctaaatcagaccctcttccactccctttttccccctcaggggccatttgggagcccaagtgggcaacacttctacaccatggaaacgactagacttaagagtatcaagcaagtgaaggtggctggctgtccatccacacacagagagaagtcttggagctcacagtcttgaaggggggacctgagagaaaactggagtagacagaagccacacgcatcattgtaactgctctttaattgtctggccttcctctgaactgggagctccgtgtggggtgtggggtctaaccagtcacagacatacacaaggagctctgtacattatctactaagcaaatgaataaaaacttcccagctgtgtttccaagctttcacagatggaaaaattaaataaaaagcc

SEQ ID NO: 3780 - DNA, 3873 bp, Rattus norvegicus
  Genbank Accession No. NM_053522
ccggcggatcctcctggggaggccgggccggggagcgggttcgggcgccgagcggcggggccagcagccgggcgcggcgagcgggaccagggcggggagcggggtagcgatcgaagcggcggcggctgcgctccgggcccgccgcaccttcccctccggtcaggggaaccgctgcatggggccgggggggcggccctgctgcgccgagcggcggcgacggcggaccccccaggcgggctggggctgagcccggggccggggcgggggctccggggggaccatgccccgaggccggccggccgcagcatggctcacgggcccggcgcgctgatgctcaagtgcgtggtggtcggcgacggggcggtgggtaagacgtgcctgctcatgagctatgccaacgacgccttccccgaggagtacgtgcccactgtcttcgaccactacgcagtcagcgtcaccgtggggggcaagcagtacctcttgggactctatgacacagctggacaggaagactatgatcgtctgaggcctttatcttaccccatgactgacgtcttcctcatatgcttctctgtggtaaatccagcctcatttcaaaatgtaaaggaggaatgggtaccagaactaaaggaatatgcaccaaatgtccccttcttgttaataggaactcagattgatctccgagatgaccccaaaactttagcaagactgaatgacatgaaagaaaaacctgtctgtgtggaacaaggacagaaactagcaaaagagatcggcgcatgctgctatgtggaatgctcagctctgacccagaagggtttgaagactgtgtttgacgaggctatcatagccattttaactccaaagaaacacacagtaaaaaagagaataggatcaagatgtataaactgttgtttgattacgtgagaaacatctttagtggccaaggaaactgtcatttctcccagaaagcatttgaaatgctacagcaatgtcctgacctcttacaatgaagcagtttaacttgaggggggagggagcctgtcctcagcatcctacagagttcattgagaatgtttcataaaggtctaagcggcagcgaacagcatctgaagccacaatctactataaatactttatttcaactagaaggtacaatctctcaggggtttcatagttaaaaagctacaatcacatcatgttgaaatgacatttagaaaaccacagtgctgtaaatggacggctcggctttgaccacgtacacttctgcacagcccttatggactctgcacaaagaaatcacttctctcccttctcctcttaattgttcttgtatgtaagttgctttctattccagtatatccagagtggcgagataaccaggccagccacgtagccaaaggtcgctccgagtgtacaggagatgggccacacctaaggaaagaattgagatctaagccaaccgatgctttattacacttgagcacaaatgaagtgtactgcacacatttctatagtgaagcttagtgtgcttcataaagaatgccaagtttaataggtcatgactgcattgatcataacactaaaagtgtccacattttagttaatgtgcattaaacagtaacatggcctctggcaactgtagctctagtttgcttttatctaaactgcatgaaatacatgcaaaagtaacatgtaaaaatgggtcattgtttaccataatcctgaactcagtttggctctgaattagttggccatttttctaactcctacactggctgtgtacatcaaatgaaataagtgagcaaaccttagaaacgttcagtcgtgtgagaggaaagacgtgggatgcgagcatgtcacgtggaatttgtggttatctcttccatggtaagctgatggccacttggagctgcagatagtgtgtccacagcagaaggtctacacaccacagcttacgtacacacctagagcgtgaggcaagaacacactccccacgctacatctcactaagccagaaatagaggagactttttaatgccacagacagggtgtgtgtgtaaagtcttgcagacaccttcatgtcctttgtaaagcttatctggtgtactgcagcctttcttacccttctctggggaatcggccatccaagtgtactggagggaaaccatcctaataactggctgctacctcgttggctttcttcttccgtctgctatggatctgccttattctaaatgccatgcaacagacagtagtgtaggcaaagcttccatgaaccacctcatgcagtctggggaagcgcaagcagatccacacattggcaccagcctcccttaggttcaaagttgctgttgcttaaactacgacatctgtctttagcaagcttctgttatcttccatggtttgtgcttaagcttggtctagtgcacagattgggtaatggaacactaaacatttatacttgaaaatgacagccttaaatgttcataccagtcacaaatctagatgtactgtcttgcatgtgagctttgtaggagtttttaaaatatgagcaccacactccccacgcggtagcagaccgtctactgacaagagctctcttggaagtggacgcaggatgtcctcaggcagtggcggttcacattaggtatatcatggccttatttatgtatgctcaaatgggacttctgtaattttcccatttagtttcggtctgtttttagatagaattgaaagaaattgtatagtcggctaacgtactagctaagttgtcaaacctatgatatgaaggaatcaagacagtaaagtattattcatttccaagttgcctttggagatttgatggtttgtttttttcttcaaatctacatctgtgaaacccttgacactcggtgtgttagcaatgagataaagtcaaggacttgcctgcttcaagagaaaaggattaagaatctaaaggtgcagtggtgtcacctcagtctcctcatgtgtggccgtggggggacgaccgtgtgtcctagtcattcttgagcgcttatcactctctcctagttgacagcagtccgttgggcttcagcttctccagatggtaagaatcatgtacacagactgtttgaactctaagcagacgattgtatcatctgaacctgaggtgccttaggtactctacttaccttgatggggtttggagtttcccattgcttgttaagagctctttgtgtttgttatttaatatttctttttgcaaaatcttctctgccactttaagcagaaaaccaaagatttgttttctattcatgaacagattatagagagactgccttattttcagacgcatgtcttcattaatggcttaggttgccacagaaattcagactaatctctggaataactctttcaaactagtgaaatatctgggaaagaaaattcttctcaatgttttattaatatgaactgtgttagtaagaacactgcttcaaataaggtcatgtgtgaaagaacatacaacaaattatagttggttagtgtttgcatagaaaatctgttctaaagccctttaaaatgttgaggggaatcctgcactctaacagcctctctttgctaacgtatgcccttcctgtccttgcaggtacattgtagctcactcgtgatgaattatcatatttcaatacacagagcttgagttcatactacttgttatcttagttattttacatactgcttccgtttgactttcaatgattggttttaaataccaaattaaatgctggtttgttggttgttgtttttaaatgattgttacttcaatagcatcccctcctgacatatggagtcataataaaatgagatgcatagtttaaaaaaaaaaaaaaa

SEQ ID NO: 3781 - DNA, 993 bp, Rattus norvegicus
  Genbank Accession No. NM_053532
tgggaagatggcggctgtgtcggtgtttcaggcaccggtcggaggcttttcttttgataattgccgcaggaatgcggtcttggaagctgattttgcaaaaaaggggttcaaacttccgaaagctcggaaaactggcactaccatcgcgggggtggtctataaggatggaatagttcttggagcagacacgagagcaactgaagggatggttgttgctgacaaaaactgttcaaaaattcacttcatatctcctaatatttattgctgtggtgctgggacagctgcagacacagacatgacaacccagcttatttcttctaacttggagctccactctctcaccaccggccgccttcccagagttgtcacagcgaatcggatgctgaagcagatgcttttcaggtatcaaggttacattggtgcagccctagttttggggggagtcgatgttactggacctcatctctacagcatctatccgcatggatcaactgataaactgccttatgtcaccatgggttctggctccttggcagcaatggctgtgtttgaagataagtttaggccagatatggaggaggaagaagccaagaagctagtgagtgaagctattgcagctggcatctttaatgacttggggtctggaagcaacattgatctgtgtgttatcagcaagagcaagctggactttctccgtccatactcagtgcccaacaagaaagggaccaggtttggccggtacaggtgtgagaaaggcactaccgctgtcctcacggagaaagtcacccctctggagctcgaggtgctagaagagattgttcagacaatggacacttcgtgaatggtgctgcgggcagttggatagctctctgggtgactcggtgtacatgccacccctgccccaccccactctaccccaatcagaaaacatgcatttggctattgctcaattaaaacaaaccagaaaacttaaaaaaaaaaaaaaaaaaaaaa

SEQ ID NO: 3782 - DNA, 2458 bp, Rattus norvegicus
  Genbank Accession No. NM_053536
atacggagccgggccgcacgcgcgaggccgtgccaggcgacgccgagtccaggcagtcctgttctgggtcctgggacaccgtgtgcactgaatttgcgtgactgtacagacgctaagtgctcagtatgtggaagttgttgagtattcgtataccctacgtataggagccacgtcacactggcagcaaacagatgtgcgcacagagacgttgtgctgctttcctgaggttgcacagctgacagctgcagacaagtcaccacaggctcggccaggccagcatggtggaccacttgcttccagtggacgagaccttctcgtcaccgaaatgcccagtgggatacctgggagataggctggccagccggcagccataccacatgttgccctcgcccatctccgaggatgacagcgatgtctccagcccctgctcttgtgccagccctgactcgcaagccttctgttcctgctacagtgcaggtccgggccctgaggcccagggcagcatcttggatttcctcctatcccgggccacactgggcagtggtggtgccagtggaggtgtcggagatggcagtggccctgtgacctggggatcgtggaggagagcctctgtgcctgtgaaggaggaacatctttgcttccctgaatttctgtcaggggaccctgatgatgtctccaggcccttccagcctaccctggaggagattgaagaattcttggaagagaacatggaggctgaggtcaaggaggccccagagagcagcagcagggacctggaagcctgtagccagctctcagctgggtcacaccggagccacctccatccagagtccggtgggagagagtgccgtatcccaccaccaggtggcaccagtgggggtggtacccaaggtgcaggtgaggggtcagctcatgatggccccatgccggtgctactgcagatccagcctgttgctgtgaagcaggaagcaggtgcagggccagcctccccagggcaggccccggagagcgtcaaggtcgcccagcttctggtcaacatccaggggcagacctttgcactcctgcctcaagtggtaccatcctccaacttgaacctgtcctcaaagtttgtgcgaattgcgcctgtgcccattgccgccaaacctattggctcaggatccctagggcccggccctgctggtctccttgtgggccagaagttccccaagaacccagcagcagaacttctcaaaatgcacaaatgcactttcccaggctgcagcaagatgtacaccaagagcagccacctcaaggcccacctgcgccggcacacaggcgagaagccctttgcctgcacctggccgggctgcggctggaggttttcacgctcagatgagttgtcacggcaccgacgatctcactcgggtgtgaagccgtaccagtgtcccgtatgcgagaagaaattcgcgcggagtgaccacctctccaaacacatcaaggtgcatcgcttcccacgaagcagccgcgcagtacgcgccatcaactgagcgcagtggccgccctcccctcccccacctccacattttgtttttaaatgcaataacttattgcctctttcagaaggatgtgacaatattaccagtcccccttctgaatcttaggaggtatgacccagagccgccgtggctgcctttccggggaggacccagagtccccaaggtccctgggggctggttccccggtggcccaggtggcccaggcaggcctgtgcccttgtgcctttgtgccttcctgccagctggaagcagtgtttggggggcccttgccctcctcccattgggctccctaccagggccaaagccaacattatcactggggaaggagtgttttggctgtgtcgaaatagtagctcccagaggaagccatgctgagaaaaaggaagtaggtcaaaagcgcagggctgtactgtggtgcgaggaccgccatatgcaagaggcctctgagggtccaggaggatggccaccctcgctctaggccctaacgcaagtgcttaaatgcaagacaaatggagccatatccatccatacccagcctggctcaccctcctccagacgccaacctcctggctgtggtgggaagcgaaaggagcaggtctggtggatgcaaagcgactagctagcgcctcccagtctgacttagatccgcattcctcgtcaggtctagaaattagtaccaattgaactagcttgtttcgacaggtctgtttcacatcctatgaatgtatgtaaataaactgtacataggtgcgcatctacataaaatatcttttaataacacgttgacatttgtgtaaatttgaaatttaaaaaaattctatgaagtcagtgtacatatgttacaattatgtatattttctttggtccttcataaaaaatatatttactttgccaataaaaagagagaaaaaaaaaaagaactc

SEQ ID NO: 3783 - DNA, 1309 bp, Rattus norvegicus
  Genbank Accession No. NM_053538
gaagaggggaccgtgcaccatggcctcccgtgcagtgccagtcaggcagacatgctgttgtttcaatgtccgagttgccaccgtagccctggccatctaccatatagtcatgagcgtcttgctgttcattgagcatgtggtggaggtggcccgcggtaaagtctcctgcaggttctccaagatgccatacctcaggctggctgacctgctctccagcttcctgctcatcggagtcctcttcattatcagcctcagcctgctgttcggagtggtcaagaaccgggagaagtacctgatacccttcctgtcccttcaaatcatggacttcctgctgtgcctgctcacactgttgggctcctacatcgaattaccagcatacctgaagtttgcccggccccggcccggtccttctaaggtacccttgatgacactgcagctgctggacttctgtttgagcatcctgaccctgtgcagctcctatatggaagtgcccacctaccttaacttcaagtccatgaaccacatgaattacctgccgagtcaggagggcatgccacgcagccagttcatcaacatgatgctcatcttttcagtggcctttatcaccgtgctcatcctgaaggtctacatgttcaagtgtgtttggacatgctacagattcatgaagcacatgaattcggccgtggaggacagcagttccaagctgttcctaaaggtggctctgccgtcctatgaggaagccttgtctctgcccactaagactccagagggggaccctgcaccacccccatactcggaagtgtgattcccaccaggctttcagcccttgggctgggagaggcggaactccccgcctcctgcttcttcactttgatggctgccatggcctactacaggacagtctgcttgtgcaccccccctcactgtcctctctgcttggggacctcttactcacaacagagtcaccctgggctaaatgaccctttgaagctcagagtactcagcctagcatctcatctagtcttcatcagcaatgatacttgttcagagaacagtcgtggcaaattagggggagttggttaacaactactggcttgatctgtttagctagatagccaacaccagcaggggcagcaggaagagaatctggccaagcaacaattcctggtgtcagtccatactcagctgtcatgggtcgtgggtcatgggtcatgggtcatggatcatgggtcatgatcatggtgcccatttgctacccccaagtacccaaaagtgtacaaataaaacaacaacaacaaaacaaacaaac

SEQ ID NO: 3784 - DNA, 229 bp, Rattus norvegicus
  Genbank Accession No. NM_053540
tgcgcgtgtgcgatcgttactgctttcctctggaaagatgccgggactggctgccgctagccctgccccgcccgaggctcaggagaagaagcctctgaagccctgctgtgcctgcccggagaccaagaaggcgcgtgatgcgtgcatcattgagaaaggagaagaacactgtggacatctcatcgaggcccacaaggagtgcatgagagcgctgggatttaagatatga

SEQ ID NO: 3785 - DNA, 3891 bp, Rattus norvegicus
  Genbank Accession No. NM_053541
ccgatcgacgcaccctcgttgacatcgtgcggcgcggcgcggcgcgggcggcccggggaccgacgggcaggcgcaccggggcatgggcgcgccggaggtctcggtgtgcaggcagggctgggtgcgccggccggggctcggggacagcggcgggctcaggtcttccctggcgaccgctgctgagcccccgcggggcccgtgacgccgcggccgatgtggcccagcgcgttgcgggcctgcaccgccgctgcacaaagacgccgccgcagccgccgcccgcaccccggccgcagccgccgcgccagccctagccccaggcggagtcccggccgcagggcagcaggcgtccgcgcgcggccggccacggcatggagaagcgcgcggccgcggggccggagggggcgccgggcgccagggcgccgctcgcagtcgtctgcctggtgaacctctttctcactgggagactcagcagtgcagttcctgccttagctgcctgcagtgggaagttggaacagcacactgaacggcgaggggttatctacagcccagcctggcccctcaactaccctccaggcaccaactgcagctggtacattcaaggtgaccgtggtgacatgatcaccatcagtttccgaaactttgatgtagaggagtctcaccagtgttccctggactggctcctgctgggcccagcagctccccctcgccaggaggccttccgcctctgtggttcagccatcccaccagccttcatctctgcccgtgaccacgtctggatcttcttccactcagacgcctccagttccggccaggcccagggttttcgcctctcctatatccgagggaagctgggtcaggcatcctgccagacagatgagttccgctgtgacaacggtaaatgcttgcctggtccttggcagtgcaacatggtggatgagtgtggagatggctcggatgagggtaactgttcggcacctgcctcagagccaccaggcagcctgtgccccgggggcaccttcccgtgcagcggagctcgctccacacgctgcctgccggtagagcggcgctgcgacggcacccaggactgcggtgatggctctgatgaggctggctgccccgacctagcatgtggccggcggctaggcagtttctacggttccttcgcctccccagacctgtttggtgccgcccgtgggccttcggaccttcactgcacatggctggtggacacgcaggacccgaggcgtgtgctgctgcagctggagctacgactgggttatgatgactatgtccaggtgtatgaaggcctgggcgagcgtggggaccgtctgctgcaaacgctttcctaccgcagcaaccaccggcctgtgagcctggaagcagcgcagggccgcctcactgtggcctaccatgctcgcgcccgcagtgctggtcacggcttcaacgccacataccaggtgaagggctactgcctcccatgggagcagccgtgtgggagcagcagcgagggagatgacggcagcacaggggaacagggctgcttctcagagccacagcgctgtgatggctggtggcattgtgcgagcggccgggatgagcagggctgtccagcatgccctccggaccagtatccctgtgagggtggtagcggcctgtgctatgcacctgccgatcgttgcaacaaccagaaaagctgccccgatggcgccgatgaaaagaactgcttttcctgccagccgggcaccttccactgtggtacgaacctgtgcatctttgagacatggcgctgtgacggtcaggaggactgccaagatggcagcgatgagcacggctgcctggctgccgtgccccgcaaggtcatcaccgccgccctcattggtagcctagtatgcggactgctgcttgttattgccctaggctgtgccttcaaactctactccctgcgcacgcaggagtacagggcctttgagacccaaatgacacgtttagaggctgagtttgtgcggcgcgaggcgcccccatcctacggtcagctcatcgcacagggcctcataccacccgttgaggattttcctgtctacagtgcatcccaggcttcagtgctacagaaccttcgcacagccatgcgacgacagatgcgtcggcatgcctcccgcagggggccatctcgtcgcagactgggccgcctctggaacaggctcttccaccggccacgggcacctcgaggccagatcccactgctgactgccgcccgtacctcacagaccgtgctgggtgatgggctcctccaggcagcaccagggcctgtaccagaccccccagtgcccaatacagacacaggcagccccagggaggctggagatgggcctcctagtggctctggccatgcaccagaagtggggccttcagtgccgcccccgcccttgaaccttcgagacccagagtacaggccagaggacaaggagagaaaggcctgtgtggaccctctggaagacagtccagcccctgtggacacacctccagagccctgcttggcccaagacccccacccccagactcccactgccagtggcatccaagatccccactcagcagagccactgggggtctgcaggagccctccaccaacctgctccccaatattggaggctagtgatgatgaggccctgctggtctgctgacccattggacacactggtgactgccacagccccgctttggaaccagggaatacacagtcatttctaccctgcctctgcattctttcttacagagacccacctagcagctccggtgaagggcctgggcactcagtcagtgggctacctgtgcagtcctattgctctgaagggcattactgtcaggggcttcgggggtggacctgggaaagagggaccgaccacctttgagatcagcatgagcatagccccttggagtctcacagcaaattgctccctgctacactaatctcgggactcatttccagaaaagcaggagagccagaaccaggctttccggaatgttttctgtggcttctcagtttatccaccctgcagtggcaccagctgctcatcctcagacctgtgccaggagctgtagttgaggcctaaaaaggccatgagaggggtagggtggacctcattcatggtgagtactatattcatccttccccacagggtccctaggaaagatgggctagtggcttctgccccagtctcatgcctatggtggcagcataggcctggctaggctgggtcagtccccaagtatcatgggtaaggctaaaagtatgagataggatgaccacaagagaggccattctatgccttcaaaggagacagaagccaaggtactggctgacaatggaaataaccattctgtcttgcctcagagtctcagtttccccacctgaagagagggctgtgctatcataagtaatagcattcactctggtgatttatgggaaggacagtagttcagctggggaatttctgggttcttctggatggccaagttcaaggtggcgtggagggttatggatggagcctcattgtcttctatgggccccatggagccagcctcaggttcaaccagcaaaacccactagggctgaaaacctcctccatagcaccttcccagctagcaacccatataccgcgctgaggcatgtctccatgaactccccttacacacagaacaaccagccctgtttatttacagacttttctggagaagctagcagggcattgctaaggcaggaagcccgaccccagtggccagtcccttacaataggcctctaagggtcgggtctctttttttgtgcagaaaaaaaaatttttgaaaacaaaacagaacacaaaccccttctcaataaacaacatgtaaacaga

SEQ ID NO: 3786 - DNA, 3730 bp, Rattus norvegicus
  Genbank Accession No. NM_053543
gaattccggtctgaatgttgtgtgaaaagagaggaaagatgggctcttcaagactcttggacttctagaaagtcagcttttgagcctaatttttggtagatctcattacagcgtgggctctctctctctctctctctctctctctctctctctccatccctcccttcaagccctcccctgcatctcagccggagcctctccgaaccggcgctgatcgatgccgagactccccagggaccctatcgcgactccatcgtgccatatctcgacatcaccgtaccctgtcgagactccattttgtcacaacccctttcaatatttatctattatatatatttttaaaatttgccctatcatatttgggggctgtccccttcatgtcgtgatttcgctgtgatctctccgtgacatcaccgcgccatcgtgaagtgtgatctcatcgctgccctgtcgttcgacttcatcaatgtcgtgttgtgacctggctgcggcgggacagttgggcaaggcgggcatcatggcctcggattgtgagccagctctgaaccaggcagagagccgaaaccccaccctggagcgctacctgggagccctccgtgaggccaagaatgacagcgagcagtttgcagccctgctgctagtaaccaaggcagtcaaagcaggtgacattgacgccaaaactcgacgtaggatctttgatgctgttgggttcacctttcccaaccgactcctgactactaaggaggcccctgatggctgccctgaccacgttctccgggccctgggcgtggccctgctggcctgtttctgcagcgaccctgaactagccagccatccccaggtcctgaacaagatccccatcctttgcacattcctgacagcccgaggggatcctgatgatgctgcccgccgctccatgattgatgacacctaccagtgcctgacagctgttgcaggcacaccccgagggccccgacacctcattgctggtggcacagtgtctgccctgtgccaggcatacctggggcatggctatggctttgaccaggccctggcactcctggtggggctgctggctgctgcagagacacagtgctggaaggaggcagagcccgacctgctggctgtgttgcgaggcctcagcgaggatttccaaagagctgaagatgccagcaagtttgagctctgccagctgctgccccttttcctgcccccaacaactgtgccccctgaatgccaccgggatctgcaggctgggctggcacgcatcctaggaagcaagttgagctcctggcagcgcaatcctgcactgaagctggcagcccgcctggctcatgcctgcggctccgactggatcccagtgggcagctctgggagcaagtttctggccctcctggtgaatctggcctgcgtggaggtgcgactggctctcgaggagacaggcacagaggtgaaagaagacgtggtaactgcctgctatgcccttatggagttggggatccaggagtgtacccgctgtgagcagtccctgctgaaggagccccagaaagttcagctcgtgagcatcatgaaagaggccatcggagctgtcattcactacctgctgcaggtggggccagagaagcagaaagagccctttgtgtttgcctctgtacggatcctgggtgcctggctggcggaggagacctcatccctgcgtaaggaggtgtgccaactgctgcccttccttgtccgatatgccaagacactctatgaggaggctgaggaggccagtgacatttcgcagcaggtggctaacttggccatctctcccactacaccagggcctgcttggccaggggatgctctccggctcctccttcctggctggtgccacctgactgttgaagatggtccccgggagattttgatcaaggaaggagccccctcacttctgtgcaagtacttcctgcagcagtgggaactcacatcccctggccatgatacctcagtgctgccagacagcgtggagatcggcctacagacctgttgccacatcttcctcaacctggtggtcaccgctcccgggctgatcaagcgcgacgcctgcttcacatcccttatgaacaccctgatgacgtcactgccctcactagtgcagcagcaaggaagactgcttctagctgccaacgtggccaccttgggcctcctaatggcccggctccttagcacctctccagctctccaaggaactccggcctcccgaggtttcttcgcagctgccatcctctttctgtcacagtcccatgtggcacgggccacccctggctctgaccaggcggtgttggccctgtcccctgactatgagggcatctgggccgacttgcaagagctctggttcttgggcatgcaggccttcacaggttgtgtccctctgttgccctggctggcccctgccgccctgcgctcccgctggccacaggagctgctacagctgctaggtagtgtaagccccaactctgtcaagcccgagatggtggctgcctaccagggcgtgctcgtggaattggcgcgggcaaaccggctatgccgggaggccatgaggctgcaggcgggtgaagaaacagccagccattaccgcatggctgctttggagcagtgcctgtcagagccctgaggggcatccagtgggtatagacccaggggcgggcagcgagggaaggagggaggaggcatcttccctgaagcccccaaactggaccccttcttcagacccccacaaacaccccagctttctggcttttctgagggctagggcgtgatgcccacctctcaagtataagaaactgcatcctgcctccagcccccttggggcagggattggcttggaacagaggttggccccgccaggccggggaaggttggagaagtccccaggaagagggcaactaagtgtcattatacccagcgtctggctccctgacaggagggaggtcccagggtaggagcgggctggcaggcgcagactgcctcagcccatgtgccctgccggccagggcgtggcctccccaaggctgtggtgccccttctggctcccccaggccaggtccgcgccctttaaattggccgtttggcttttgcttcggtccttttggacagagagcaggctcaggccattgacatcacagttcttcctttcaactctagtgacccggggtccgagttgcccctatgcttccagggcaatttggagcagacagaccagtggggggcggggaacctccttccacctgcgcttccttgaggggaccggagtgcccttggtcccaggtctcttcaccttttgtgtcatgttgcagcagagtgaagatgggggttgggggttatttattttgcttgtccttatctctgcttggacacctgagcatcagctccctgtgcccctgctcccatctggcctggctggagccaggaacaggaggtcacatcaccctagaatccccatgttttccctgtgattgcactccactgccaccgtggtgcctggcttcagttcccctcccccccgtccctgctaagactcttctctgcagggagacgcgactggcggctccagcaggaactacctttctgaacccgtggagacccgcatacacctgaccccttgcttccgcccctccccccagtgcgttctgtgatcgccaagttcaaagctgtgcacatgtggacactcaataaatgtttattggtg

SEQ ID NO: 3787 - DNA, 1435 bp, Rattus norvegicus
  Genbank Accession No. NM_053551
gaattccggcacagcgcacttgctctcgctcgaccgcgctcccgccccgcagtcctcaccaaccctacggatcctagccaccgccagcctaggagggcatcaggatgaaggcagcccgtttcgtgatgcgcagcgccagctcgctgggcaacgccggcctggtccccagggaggtcgagctgttctcccgctacagcccgtccccgctgtccatgaagcagctgctggacttcggttcagaaaatgcctgtgagagaacttctttttcttttcttcggcaagaattgcccgtcagacttgccaacatcctgaaggagattgacatcctccctgaacacttagtgaacaccccttccgtccagctggtgaagagctggtacatccagagcctgatggatttagtggagttccacgaaaagagcccagaagaccagaaagttctatcagactttgtagacacgctggtcaaagttcgaaacagacatcataatgtggtccctacgatggcacaagggatcctggagtacaaagacaactgcaccgttgaccccgttaccaatcaaaatcttcagtattttttggaccggttttatatgaaccgcatttctactcggatgctcatgaaccagcacatcctcatattcagtgactcaaagacaggaaacccaagccacattgggagtatcgaccccaactgcgatgtggtagcagtagtcgaagatgcctttgagtgtgcaaagatgctctgcgatcagtattatctaacgtcgccagaattaaagctcacacaagtcaatggaaaatttccaggccaaccaatccacatcgtgtacgttccttcacaccttcaccacatgctctttgaactattcaagaatgccatgagggccacggtcgagcatcaagaaaaccgccctttcctgacaccagtcgaggccaccgtcgtcttgggaaaagaagatcttacaatcaagatttctgaccgaggtggcggtgttcctctgaggattactgaccgcctctttagttacacatactccactgctccaacgcctgtgatggacaattcacggaatgcccctttggctggttttggttacggcttgccgatttcccgtctctacgccaagtattttcaaggagatctgaatctctattccatgtcaggctatgggacagatgccatcatctacttaaaggctttatcatctgagtctatagaaaaactccccgtctttaacaagtcagccttcaaacattatcagatgagttctgaggctgatgactggtgtatcccaagtaaggaaccaaagaatctgtcgaaggagaaactggcagtgtgacggggatctcgcctggcacttttacgggatcaaagtgggtctacggcagtgctgcttcgtgaatgtgtgtggactcttgtttccgcaaaaca

SEQ ID NO: 3788 - DNA, 309 bp, Rattus norvegicus
  Genbank Accession No. NM_053555
atggcagggaaagaattggagcgatgccagcggcaggcagaccaagtgacggaaatcatgctcaacaatttcgacaaggtcctggaacgcgatgggaagctgtcagagttgcagcagcgctcagaccagctcctggacatgagttctgccttcagcaagacaaccaagactttagcccagcagaagcgctgggagaatatccggtgccgggtctacctggggctagccgtggctggcggccttctcctcatcctggttgtgcttctggtcatctttcttccgagtggagaggacagtagtaaaccatag

SEQ ID NO: 3789 - DNA, 816 bp, Rattus norvegicus
  Genbank Accession No. NM_053556
cggcacgagcttgagtttccgatgagacacaagactgaagaggaaaactgatctcccccaaagacatagaataattggtaaatctggacgagaacacaggctcataactgcgaagagcaaggatttttatattactcttataggaaagagaccgaaagatctttacaagctatcttgctaggagatgcccaaagtcaaaagaagccggaaagcacctccagatggctgggagctgatcgagccaacgttggatgaactagatcaaaagatgagagaagctgaaactgaaccccatgaggggaagaggaaggtggagtctctgtggcccatcttcaggatccatcaccagaaaacccgctacatcttcgacctcttttacaagaggaaagccataagcagagaactctatgaatactgcattaaagaaggctatgcagacaaaaacctgattgcgaagtggaagaagcagggctatgagaatctatgctgtctacgctgcatccagactcgagacaccaacttcggcaccaactgcatttgccgggttcccaagagcaagctggaagtgggtcgcatcatcgattgcacgcactgtggctgccggggttggtctggttgactgacgcccctgactcctctgcatcttggactttggaccttgggctcctgcttattgggccactgcctcctgaagcaactcttctcagattggcactcagagaaaagacccaggggaagcatgagctctacaggtgacagctttagtgttcaccagctgagatctgtaaaaataaaacctttagacctcttaaaaaa

SEQ ID NO: 3790 - DNA, 1511 bp, Rattus norvegicus
  Genbank Accession No. NM_053563
tgggctcaaggaaggaagcgttgtagctcgcgtccaggggcgcggcgtgtacgggtggctctcttcgcagctcgcggaggcgaaccgggcaacagtgacatggcagaacaggatgtggaaaatgagcttttggattatgatgaagatgaagagccccaggtaccccaggagagcactccagctcccccgaagaaagatgtcaaaggatcttatgtctccatccacagttctggcttccgggactttctgctgaagccggagctcctgagagctatagttgactgtggctttgaacatccttcagaggtccagcatgaatgtattccccaggccattctgggtatggatgtcctgtgccaagccaagtctgggatgggcaagacagctgtgtttgtgctggccaccctgcagcagattgaacccatcaatggccaggtatcagtactggtcatgtgccacacaagggagctggccttccagatcagcacggagtatgagcgcttctcgaagtacatgcccagtgtcaaggtatctgtgttctttggaggcctctccattaagaaagatgaagatgtgttaaagaagaactgtccccatgttgtggtggggacaccaggccggatcctggccctcgtgcggagcaggagcctcaacctgaggaatgtgaagcactttgtgctagatgaatgtgacaagatgctggaacagctggacatgcgccgggatgtacaggagatctttcgtctgacaccccatgagaagcaatgtatgatgttcagcgccaccctgagcaaggagatccggccagtctgcaggaagttcatgcaggatcctatggaggtgtttgtggacgacgagaccaagctcacactgcatgggctgcagcagtattacgtcaaactcaaggacagtgagaagaatcgtaaactcttcgacctccttgacgtgctagagtttaaccaggtggtgatctttgtcaagtctgtgcagcgctgcatggccctggcccagctcctagtggaacagaattttccggctatcgctattcacagaggcatggcccaggaggagcgcctgtcccgataccagcagttcaaggacttccagcgtcgcatcctagtggctactaatctgtttggcagaggcatggacattgagagagtcaacatcgtcttcaactatgacatgccagaggactcggatacctacctgcaccgagtggctcgtgctggtcgctttggtaccaagggtctggcagtcacttttgtgtcagatgagaatgatgccaaaatccttaatgacgttcaggaccggtttgaagtgaatgtggctgagcttccagaagaaatagatatctccacatacattgagcagagccggtaaccatgtgtgtagccaggcacatggctttctctcctgctgcttcagatcctcctcctaggtggcaatcggcggcctctctttttattgttccaaagctttagctatgttaagaataaacttttattgtg

SEQ ID NO: 3791 - DNA, 1942 bp, Rattus norvegicus
  Genbank Accession No. NM_053567
aattccactcaggtgctggccatgtcccagttggtggaatgtgtccccaacttctcagaggggaacaaccaggaggtgatcgatgccatttctcaagccatctcccagaccccaggttgtgtgctgttggacgttgatgctggaccctccaccaaccgcactgtctacacttttgtggggcagccggagtgtgtggtcgagggagccctcagtgctgcgcgaacagcctcacagctcatcgacatgaggaagcacaagggagagcaccctcgaatgggtgctctggatgtgtgtcccttcatcccggtgaggggcgtcagcatggacgagtgtgtgctctgtgccaaggcatttgggcagcggctggcagaggaactgaatgtaccagtgtacctctatggtgaggcggctcagatgcccagtcgtcagaccctgccagccatccgggctggagagtatgaggccctgcctgagaagctcaaacaggccgagtgggtgcccgactttggccctagctcctttgtccccagttggggtgccactgtcacgggtgcacggaaattcctcattgcgttcaatatcaatctgctaagcaccaaggaacaggcccaccgtatcgctctcaacctgcgggagcagggccgagggaaagaccagccgggacgtctgaaaaaggttcagggcatcggctggtacctagaagagaagaacctggctcaggtgtccaccaacctcctggattttgaggtcacggctctgcacacagtgtacgaggaggcccgccgagaggctcaggagctgaatctcccagtggtgggctcacagctggtgggcctggtgcctctgaaggccttactggatgccgcagccttctactgtgacaaggagaagctgtttgttctggaggaggagcaccggattcgactggtggtgaaccggctgggtctggattccctggcgcccttcgacccaaaggagcggatcatcgagtacctggtcccggatagtggaccagaacagagcctgctggacgcatcactgcgtgcttttgttcgggaggtgggagcccgctctgctgccccaggaggcggttccgtagccgcagctgttgcagctctgggtgcagccctggcttctatggtgggccagatgacctatggccggcgccagtttgatcacctggattccacaatgcgacgcttgatcccacccttccatgcagcctccgcccagctgacttcattggtggacgctgacgcgcgggcttttgctgcctgtttgggggcaataaagctgcccaagaatacgcctgaagagagggacaggcgcacatgtgctctgcaagaggggctgagacaggcggtcgctgtgccactgaaactggctgagacggtgtcccagctatggccggcgctgcaggagctggcccaatgtggcaacctctcttgcttgtctgacctgcaggtggcagccaaagccttggagacaggtgtgtttggtgcgtacttcaatgtgctcatcaacctgaaggacatgacggatgatgtatttaaagagaagacacgccatcgaatctccagccttctgcaggaagccaagacccaggctgcgctggtgctgggtagcctagaagctcggaaggagtgaagagatcgctcctcagtgaatggtccaacttccagaattccttacctatcttgcttggggagaagactcagccatgatatcagcagggtcaggttggggctctatagacagctgtaggatcagaagacccaacagaggtggtttggggtagggtatggtagggcctgattgggggtggtatcccgacactctctgttatctgtggcttctagtaaaatttgaacaggtccattttatgagattgtagaagacaaaaagaacagcaagagttctgacttgacctcagatcttgggg

SEQ ID NO: 3792 - DNA, 1846 bp, Rattus norvegicus
  Genbank Accession No. NM_053568
tgtgtcgcgggagctgccaggacttgcggggggcctctggtgccatgatccggaacgggcacggggctggcggcgctgctgggctgaagggtccgggcggccagcgcaccgtgcgggtgtggtgcgatggctgctatgacatggtgcattacggccactccaaccagctacgccaggcgcgggccatgggggactacctcattgtgggcgtgcatactgacgaggagattgccaagcataaggggcccccggtgtttacccaggaggagcggtacaagatggtacaggccatcaagtgggtggatgaagtggtaccggctgctccctacgtcaccacactggagacactggacaagcacaactgtgacttctgcgttcatggcaatgacatcacgctgacagtagatggccgagatacctacgaggaagtgaagcaggctgggaggtacagagagtgcaaacgcacccagggtgtgtccaccacagacctcgtgggtcgcatgctgctggtgaccaaggcccaccatagcagccaggagatgtcctctgagtaccgggaatatgctgacagttttggcaagccccctcacccgacacctgccggggacacactttcctcagaagtctcctcccagtgccctggggggcagagcccctggacaggggtgtcccagttcctacagacatcccagaagatcatccagtttgcttctgggaaggagccccagcccggggagacagtcatctatgtggctggtgcctttgacctgttccacatcgggcacgtggacttcctacaggaggtgcacaagctagccaagaggccctacgtcatcgcgggcctacactttgaccaggaagtaaaccggtacaagggcaagaactaccccatcatgaacctgcatgagcggactctcagtgtgctggcctgccggtatgtttcagaagtggtgattggggcaccgtactccgtcacagcagagctcctgaatcatttcaaggtggacctggtgtgtcatgggaagacagaaattgtacccgacagggatgggtctgacccctacgaggagcccaagagaagaggcattttctgtcagattgacagtggcagtgacctcactacagacctgattgtgcaaaggatcatcaagaacaggttggagtacgaagcacggaatcagaagaaggaagccaaggaattagcctttttggaggccctgaggcagcaggaggcacagcccagaggggagactgactagcttctgacccggagacgtcattcacgccgttgccctgtgcccacctcatctctccctgccctgctctgcttctgtgtcttggtgtcagctcacacaattccaaaggaaactggccttgctgagggtgctgtccctgcctgcctgcagcaggctctcagtcctttccactgagctgctcagagagggtagctagcccagtggggcagccccgtggacaggataagcagacggcacctgtgactggaggattgttgctgtgtatccttggcatccacgggttccaactgcccactgtcccagtttggctggggatacccctcctgcctgactggaagctgcacttctgcccaccgagctttggtgaaaggtacagaggctttggggacctctgttcctgggccaccctgcacgtgggcaccctctaccttggggcacgttctagcaccccattcctgactcctagaagatgcacttgccccgggtggctgggccagcgtggctgccctccgcacagacttcctggtcctcgtttgtacctcagtggctgatgtaaacctctttggctcaactgaataaagcctagtggg

SEQ ID NO: 3793 - DNA, 1414 bp, Rattus norvegicus
  Genbank Accession No. NM_053576
gcgcctccttgttcccagcgtcaccactgccgccatgcccggagggctgcttctcggggacgaagcccccaactttgaggccaataccaccatcggccacatccgcttccacgatttcctaggagattcatggggcattctcttttcccacccacgggactttaccccagtgtgcaccacagaacttggcagagctgcaaagctggcgccagagtttgccaagaggaatgttaagttgattgctctttcaatagactctgttgaggaccattttgcctggagcaaggacatcaatgcttacaatggtgcagcacccacagaaaagctaccatttcccatcatcgacgataaggacagggaccttgccatcctgttgggcatgttggatccagcagagaaggatgaaaaaggcatgcccgtgacagcccgtgtggtattcatttttggccctgacaagaaactaaaactgtccatcctctacccagccaccacgggcagaaactttgatgagattctcagagtggttgactccctccagctgacagcatcaaatccagttgccactccagttgactggaagaagggagagagtgtgatggtccttcccaccctccctgaagaggaagccaaacaacttttccctaaaggagtcttcaccaaagagctcccatctggcaagaaatacctccgttatacgccccagccttaagtctgcgggaactggggctgcaactgctcgaccagcactgggacctgaggatgacagctgacagctgcagttccgtagaaagattgtggcgtggtcacagccgaagtcgcgtaggtcgctcgctatactactggctcattaaatggaaatggcaccaaaacattctcgggattctttactctgtgccttcgccagcattctgcccctccatccatcacagcgccctgctgactggctttctttgaaacgaattatgtgttggtgactgcagggtctctgcagggtctgtgatcagcaaggtagtgtcagtgtgggctccatgctagaatgataaacatcttttgtaggtttccaaactgaatcttctgttacccattgtggagaaccataaagtggggagaaactttcaattctgtactttcagtaaataaagcaggggaggtggggggggggggagagttctctataggaaatccatggtgagtttctatcaaagtgggcttccaagaatgtgtggaagacagcacatgtacttcctggagtttccaggtctgctctctagtgatctgtgaatgtgaactcgccttatgaaagacaggcagtgacattgtttgccactaaatgtcctaaaggagtgggttgccatttctaaattctgctgtgtgaggttcaacaataaaatcctgattagaaaaaaaaaaaaaa

SEQ ID NO: 3794 - DNA, 2412 bp, Rattus norvegicus
  Genbank Accession No. NM_053584
ggcacgaggatggcggcgggaaccagcaattactgggaagatcttaggaaacaagctcgacagctggaaaatgaacttgacctgaaactagtttccttcagtaaactgtgtacgagttacagtcacagcagcgcccgggatggaggccgcgataggtatagttctgacacaacacccctattaaatggatcaagccaagacaggatgttcgagacaatggccattgaaattgaacagcttttggcgaggcttacaggagtaaacgacaaaatggcagagtatactcacagtgcaggggtgccctccctgaacgcagccctgatgcacacgctacagcgacacagagacattctgcaggattatacacatgaattccataaaaccaaagcaaactttatggcaatacgggaaagggagaatctcatgggatcagtacgaaaagatattgagtcatataaaagtgggtctggagtaaacaacaggagaactgaactgtttctgaaagaacatgaccaccttcgaaactctgatcgtctgatagaagagacaataagcattgctatggcaacaaaagagaatatgacttcgcagagaggaatgctcaagtccattcacagcaagatgaacactctggccaaccgctttcccgccgtcaacagcctgatacaaaggatcaaccttaggaagcggcgcgactcgctcatccttggaggcgtcattggcatctgcaccatcctgttgctgctgtatgcattccactgagaggtcggccccaggactctgcccaccctctgcggcctgctttggcaatggggaacctgcaaaggagagagaccgtccggccatgagcctgccagcagatgaattctaaactgcaccgtggctctgacctggtcggcctgagctgaagccacagtttttctgtgcctatcttttctaatacatattactctgtttttaattttaaaaacaacaaaaggtttcagttgctgcatctccctaggaggtaagcaagcagaagctgagaacctgggctttagtgactggtgaagccagatgaccagcgggcctcatagctggactcctcacagcaccaggctctacatccaaagatggcctcactttcagccacgagattggatgtgaataaaaataattcttgtccttttatttaacacttgtgatgagaagtcagctgtcctttgctgatactccgtgatccaatcgcgtattctgtgtccctaatctcttggcagtcaagaaaaattccatttcccacggattctgtaagatgttggtaggccagcttcatgtttgaggcggtctgaaatggaaagtgctatagaaagggtgtctcttttctgtttcagttgtgagccctgggtcaactactgccaccagcacatcagaatggcgggccttacagaggagctggtcattgctttattatttcttcccttgggctgatatttgcttgtattgataaaaatgcatttccagtgatagcccgtcagtgactgtcatcggccctcgaagtcccatatcatgtgaagcttaatactaggaactgaaggagggacttggttctctgtgaggcctgctcgtgagccactgctgtgagggttgggaggataaaattatgttttgggttttggtggtgggagattattttggagttgttgttggttgggaatgtggtgagggatatagagtaaattagtcgagtatagaagaataggcttaatagggctatgatagctattagtgttgatagggttgagcagttgttttttagaagctcggagataattgctcattttggtaaaaatcctgtgagaggggggagtcctcctagtgataggaggatgatggatgctatggttaggattatgggagttttatttcatgcgagtgagagtgtgttgattgttgttgctgagtttgttatgagtgtaatgaatattggaacagtaagtaggatgtaaattgttaagtttaggagggttaagttagggttgtatggaaggattgctgttattcatcctatgtgggcaattgatgagtatgctatgcatttttcgtgtttgggtctggttaagtcctcctcaggcgccaacaaagactgatgaaattgcgagaatggtggtgatagttgggtttaggagttgataaaattggtatagaattgatagtggagcaattttttgtcatgttagtaagattaatccaatgtgtaggggaattccttgggtgacttcgggtagtcagtagtggaatggggctagtccaagttttatggctagtgaaatgagtattatgttgagtagtatgttattggtttgttgttggagggttcatattcctgattgtttgtagttgaggatgatgactagtaggataattctcgtgccg

SEQ ID NO: 3795 - DNA, 485 bp, Rattus norvegicus
  Genbank Accession No. NM_053586
gcttgtctcgagcgagatggcttcaaggttacttcgcggagtaggcgctttggcggctcaggccctgagggcccacggaccccgtggcgtggccgctacccgctccatggcttctggaggtggtgtccctactgatgaggagcaggctaccgggctggagagggagatcatgatagcagcacagaggggactggatccatacaatatgctacctccaaaggcagcttcgggcaccaaggaagaccccaatctagtcccatccgttagcaacaagagaatagtgggctgcatctgtgaagaggacaactgtactgtcatctggttctggctgcaccaaggcgagagccagcgatgccccaactgtggaacacattacaagttggtgccctaccaaatggtccactgagcccacccctggtttaacatttcagaatgtaaaggaaaacgtctctcaataaagactagccaacgcactggctccttcc

SEQ ID NO: 3796 - DNA, 494 bp, Rattus norvegicus
  Genbank Accession No. NM_053587
cggcacgagctccttagctttgagcaagaagatggctgccaaaacaggatctcagctggagcgcagcataagcaccatcatcaatgttttccatcagtactctaggaagtatggacatcctgacaccctgaacaaggcggaattcaaagaaatggtgaataaggacttgccaaattttctgaagagggagaaaagaaatgaaaatctcctaagagacatcatggaggacctggacacaaaccaggacaatcaactgtcctttgaggagtgtatgatgctgatgggaaagttgatctttgcctgtcatgagaagctgcatgagaacaacccacgtgggcatgaccacaggcacggcaaaggctgtgggaagtaattaagaggtcgccatgtaacatctgcccaaccaagtctaaagggaatagcttactaaatgaccttggttctggggctgggaaataatttaaaaatgaataaataaagtctttatccattcc

SEQ ID NO: 3797 - DNA, 799 bp, Rattus norvegicus
  Genbank Accession No. NM_053590
cagcaggagttaggcgcgatgctttccactgccgcttaccgggacccggaccgagagctggtaatggggcctcagggctccgccggccctgtgcagatgcgtttctcgccttatgccttcaacggaggtactgtattggcaattgctggagaagatttttccatcgttgcttcagacactcggttgagtgaagggttttcaattcatacccgagatagccccaaatgttacaaactaacagacaaaacagtaattggctgcagtggctttcatggagattgtctcaccttgacaaagattattgaagcaagattaaagatgtacaagcattccaataacaaggccatgacaacaggggcgattgctgcaatgctgtctaccatcctgtactcacggcgtttcttcccttactatgtctacaacatcattgagggacttgatgaagaaggaaagggagccgtgtacagctttgacccagtaggctcttaccagagagactctttcaaagccggaggctcagcaagtgccatgctgcagccgctgctcgacaaccaggttggcttcaaaaatatgcagaatgtggagcatgtccccctgactctggacagagccatgaggctggtgaaagacgtcttcatttctgcagccgagagggatgtgtacactggagacgccctcaggatctgcatcgtgaccaaagagggcatcagggaggagactgttccccttcggaaagactgatgtggggccagggtttggagctgtggcacgtttgttttattaaaaagaaatgtaaagg

SEQ ID NO: 3798 - DNA, 952 bp, Rattus norvegicus
  Genbank Accession No. NM_053592
ggcctccagcgccatgccgctcttgtgcgcgctgctgcgcagccgactccaaccttctctgctccgctcgcttacgctcacgtccgcgcaaagcctaagctgcggcggaagcagaggagtccggacctggagcgcgcggaccggacccggagcgtgcgctgaccctgcggtctctgtctctaagagggctcgagcggaagatgacgcttctctgcgtttcgtgcggctctcggagcacgctacggctcccacccgcgggtccgcgcgcgctgcaggctacgacctgtacagtgcctatgattatacaattccatccatggagaaagcccttgtgaagacagacattcagatagctgttccttctgggtgctatggaagagtggctccacgttctggcttggctgtaaagcacttcatagatgtaggagccggtgtcatagacgaagattatagaggaaatgtcggcgtcgtgctgttcaattttggaaaagagaagttcgaggtgaaaaaaggtgaccggatcgcgcagctcatttgtgagcggattctttatccagacttagaggaggtgcaaacactggataacactgagagaggttcaggaggcttcggctccacgggaaagaattaaaactttgcttgaagtactttgctgtttgaacactgtaaacgagctttaatttcagaagcattttgtgttctaggatgtaggaaaggatacctatcacggtggaactgctctgttctctagttgatggttgcctgtaaatctgtatcgtgagaactggcagtgacatgcagacttggttattagatattttttttaaatttggtattgtatttaaattatagtcctataagaactgattttgctctaattgctatattatttgtaattttttttttttatccaataagtccgaagtctttagcgaaaaaaaaaaaaaaaaaa

SEQ ID NO: 3799 - DNA, 1232 bp, Rattus norvegicus
  Genbank Accession No. NM_053593
ccgaagcgtccagctgcccgggaccgatccccggtgtatggcgccgcagaaacggctcccgggcccagataaagggcacctccgcagctcttggccgagagatcccctgctccgagaatggctaccactcgatatgaacccgtggctgaaattggtgtcggtgcctatgggacggtgtacaaagcccgagatccccacagtggccactttgtggctctcaagagtgtgagagttcctaatggaggagcagctggagggggccttcccgtcagcacagttcgtgaggtggccttgttaagaaggctggaggcctttgaacatcccaatgttgtacggctgatggatgtctgtgctacttcccgaactgatcgggacatcaaggtcaccttagtgtttgagcatatagaccaggacctacggacatacctggacaaagcacctccgccgggcttgcctgttgagaccattaaggatctgatgcgccagtttctaagcggcctagatttccttcatgcaaactgcattgttcaccgggacctgaagccagagaacattctagtgacaagtaatgggacagttaagctggccgactttggcctagccagaatctacagctaccagatggccctcacgcctgtggttgttacgctctggtaccgggctcctgaagttcttctgcagtctacatatgcaacgcctgtggatatgtggagtgttggctgtatcttcgcagagatgtttcgccggaagcctctcttctgtgggaactctgaggctgaccagctgggcaaaatctttgatctcattggattgcctccagaagacgactggcctcgagaggtctctcttcctcgaggagccttttcccccagaggacctcggccagtgcagtcagtggtgccggagatggaggaatctggagcgcagttgctgctggaaatgctgacctttaatccacttaagcgaatctctgccttccgagccctgcagcactcttacctgcacaaggaggaaagtgacccggagtgaggagaggggctgccttttccagtttccggacgctgtgtggaaagaaccttgctgaagtggcagcctctgccttcccctgaggctatggagagtcctccggtttagccttaaatgacaattccctacctctccttatgaggtttaccccacccccaccctcctgtttctctacactaaagggcaggcattatctgtcttcttcc

SEQ ID NO: 3800 - DNA, 4469 bp, Rattus norvegicus
  Genbank Accession No. NM_053596
cgtgcggtcggagcgtagagctcagcgcagagcaccgggagccggagccttagcgggaggtgcatccaaagcccggccgttcggagcccgcgagcgatgatgtcatcctacaagcgggccacgctggacgaagaggatctggtggactcactctccgagggcgatgtgtaccccaatggcctacaggtgaacttccgcagcccccggagcggacagaggtgctgggcagctcggacctcggtggagaagcggctggtggttctggtgacgcttctggcagcagggctggtggcctgcctggcagccctaggcatccagtaccggacaagaacgcctccggtatgtctgactgaggcctgtgtctcagtgaccagctccatcctaaactccatggaccccacggtagacccctgccaggacttcttcagctacgcctgtggtggctggatcaaggccaaccccgttcccgacggtcactcacgctgggggaccttcagcaacctctgggagcacaaccaagccatcattaagcatctgctggaaaattccacggccagcgcgagcgaggcagagaaaaaggcgcaagtgtactaccgtgcgtgtatgaacgaaactaggatcgaggagcttcgggccaagcccctgatggagctgattgagaagctcggaggttggaatatcacaggaccctgggccaaggacaacttccaggacacgctgcaggtggtcacagcgcactaccgcacctcacccttcttctctgtctatgtcagtgccgactccaagaactccaacagcaatgtgatccaggtggaccagtccggccttggcttgccctccagagactattacctgaacaagacggaaaatgaaaaggtactgactggctatctgaactacatggtccagctggggaaactgctgggtggtggggacgaggactccatccggccccagatgcagcagatcctggattttgagaccgctctggccaacatcaccatcccccaggagaagcgccgggatgaagagctcatctaccacaaagtcacggctgctgagctgcagaccttggcacccgccatcaactggttaccctttctgaatgccattttttacccagtggagatcaatgagtctgagcccatcgtggtctacgacaaggaatacctcagacaagtctccacactcatcaacagcaccgacaaatgcctgctcaacaactacatgatgtggaacctggtacggaaaacaagctcctttctcgaccagcgctttcaggatgccgatgagaagttcatggaggttatgtacgggacaaagaagacctgtcttccccgctggaagttttgcgtgagtgacacagaaaacaacctgggctttgccctgggccccatgtttgtgaaagcaacctttgcggaggacagcaagaacatagccagcgagatcatcctggagatcaagaaggcattcgaggagagcctgagcaccctgaaatggatggatgaagatactcggaggtcagccaaggagaaggcggacgccatctacaacatgataggctaccccaacttcatcatggaccccaaggagctggacaaagtgttcaatgactacacagcagttcccgatctctactttgagaacgccatgcgatttttcaacttctcattgagggtcacagccgaccagctcaggaaagcccccaacagagatcagtggagtatgaccccgcccatggtgaacgcctactactcgcccaccaagaacgagattgtgtttccagctggaatcctgcaggcgccattttatacccgctcttcgcccaacgccttgaactttggtggtatcggggtcgttgtggggcacgagctgactcatgctttcgacgatcaaggccgggagtatgacaaggatgggaacctccggccctggtggaagaactcgtcggtggaggcattcaagcagcagaccgagtgcatggtacagcagtataacaactacagtgtgaacggagagcccgtgaatgggcggcacaccctcggggagaacatcgcggacaacgggggactcaaggcagcctaccgggcgtaccagaactgggtaaagaagaacggagctgagcagatactgcccaccctgggtctcaccagcaaccagctcttcttcctgggattcgcacaggtctggtgctcggtccgcacaccagagagctcccacgaaggcctcatcaccgatccgcacagcccctcccgcttccgggtcatcggctcactctccaactccaaggagttctcagaacacttccgctgcccgctcggctcccccatgaaccctcgccacaaatgcgaagtctggtaagggctgaagcgcagagaacacaggtggaagaagggaaggggcctgcagccagctcccgggaacagggccgcgctgtcaccctccttccagcccctcggccgagggccccttccccaccctggagggtatgcagccatcttgtctaagcctatgccagaggctcagcactggaagccaacatttgacccccttcgaagctccagcatcccagacacccttgagtgatgctataccgggcctttgggtgtgtcaagctggtggcttgccagccctgggcctcacactgacaatggcagtgggacaggaccctttgccacgtccaatgccagatataccacaataccactgtgtcaaatgctttaaagatatattttttggggagactattttttaagcattatggaatacactggaaatcttcagggaaaatgcatttaaaacacttttttttaaaaaaagattagtatatttattatgttctctcttttttttctaaacaacctgcggacaaaggaaaccccactgattgaccccaggggaccccaggctgttgagcaggccaccagtttgagcactgctttagcccattgttggtgtaattgcttgtgcagtcaggagatgtaggggccaggcagaaggggtggccagctgaagggcctgatttatgagcatggccttctctgtcctgtctccggagtccaaccatgggaaccccaacaaggacgggctgttacccaagttgatccctatggcagtacaaagccagagtaatggcctccgtacaaccgggggacccctgaacactctggacaacatcacaggagcccgtcggggctgagaccccacaccccatcagatgcacactattgtccaaagatgtcttgttttggtcccacctcttctggccttgggaccggttgcctctctgtagcagttctgacatcctgaagtggtcgccctctgtaccaggggaaaggggaaagagaaagcagtccagttctccctccaagctccgtagcctgtagttaccctggcttggctcctgggaccccttctctagtgccttaccccaggccacagcccctgagcccctttgaggaggcagcatttgtcttgctttctcagtggagcccccaagtgtcctgactagaagccaacaccatagccccactcccagaagccccagggtaccgtcccaaaccctacaggacagccattccacacattccccaccccacccccctctgcagcaggccaagactggaaggttcccagccccatcgggctccagggaatggcaggatgtcatccacccacagcatcacctaacagatatgtgggcctccactaagtggcgctcactgaggttttcatgactgctgtagggagcaagctcttgtgacctgtgtgtgaggagcgcagtagaagtgcccatcacagcccctggcaagtcatgcccccacatagcacaacacacacacacactcacctggaagccagagtcctccttggccaagacgcagagacagtgtagtctcggtcctgctagcgtagcgatagtcttagcactgggatggggagctgcaagcgggtgtctggcaaggttcttggtccctgtgaacacattcgaggtctcagctcttcggggaaaagtaacacaggaagcaggaaggtgctggagccacgccctgccacacaggggggaccttctgggtgggatcatctgccctttctatcccctcgccctgcttccccacaggtggccgtcctggatgccagtatctagaagcagggtcctgagctggagttagccatgcacgcattgctcagggtgtgcagggagccaaggcaggaaaacccaggctggttagggatggatgggtgcaaaagcagcatcccgacccctgtccctccagagatttgagaagggcagaattaggaagggcacccgccctcagaaagagccctcctctcaagcccggagtttccctgcaggcacaaggacatggggtttggaactggggactctatttttttgtattattgtgttttgtgctactgtagttttggtgtggcacctattataattaaaataaagtacttatacc

SEQ ID NO: 3801 - DNA, 2954 bp, Rattus norvegicus
  Genbank Accession No. NM_053598
ccggctccggagcaccgcgacttcgttcggtccgactccccggcggggtggcggcggccgggtccccacggtggcggccggagcagcggctgcaggagcccggctctaggatgaagttcaagcccaaccagacgcggacatacgaccgcgagggcttcaagaagcgggcggcctgcctgtgcttccgcagcgagcaggaggacgaggtgctgttggtgagcagcagtcggtacccagaccaatggatcgtgccgggaggaggggtggagccggaggaggagcctggcggtgctgctgcaagggaagtgtatgaagaggctggagtcaaaggaaaattaggcagactcctgggaatatttgagaatcaagaccggaagcacagaacatatgtttatgttctgacagtcactgaaatattggaagactgggaagactctgttaacatagggaggaagagagagtggttcaaagtggaagacgcaatcaaggttcttcagtgtcacaagcctgtccacgcagagtacctggaaaggctgaagctggggtgttctccgaccaacgggaattccacggtcccttccctcccagataacaatgccttgtttgtgactgccgcaccaccctctggggtgccatccagtataagatagagagctggggcccctcccccaccgtgtcatggcacatgtcagagggagagaggcttttttacttctaacacatctgactgctgctggcagactctagatttgccatgcaggggtttcaaataatttgcatgtatttcagatgctttcaactcttttaaaataaataacaaaatagcaaaaatactttaagatgccaaagccatgtggattttttttaaagccttaattgtaagtctaccccattactttggttctcatttttataacctttcttaaaatttcacttttgaacactcaacattctatggtttattttgacagatcaactggttgttgggtatgtttttgccctaatatttttttcttacagtatcaaatagtcaccaaatctttgggaattaatgaaaaatattcttggtatttaaaaaaatatatatgtgccccaaaacttgtttaagagagtcgcattctctccacttgtaagctgcaggtttgcgctgatttgtatggacgggccagttgcctttgaccaagcactcaagtttactctatccgagaatttgtacacagcaagaattatgtcagtgcacaggcactgcctcccctctgacacggtgattccatatgaatcactccatttttagggaaaactgtcaggaacttgcctgtggcaccgcacagctcattctgaaactgttcagagaagtctgttcagcacgctctgcggctgcttcctccctgctccttccgacacagactgtgttaggggccacattgctcccatggccagtgctcttcatattttcagtctagcaacaacactgttgaccagtggattagactctaaccttagatacagcagtcactgactggcatccaaggttagatcacactaaacaaaatggctgtcctaggcctaagacactgtcttgagtgtcagtaagcagcttgtcagatgagtgtgagggaactagaactatgttaccttgtctttgtgctctctcaaaacgggccaccccatggaaaagtacctacatttccttcaggaagtcatggaggaagtgaagggggaggggggagaggaaaagatctttcgcagtacagttaggacatctgtaacctgttaacctttaaattgtaatgttgctgctgccaatgtccttacctgtaaggaaggaaaatgagatctcgtgcccaaatgcagcagaactaaaaacattaggttacaaagcagaaaaacccaaccagtagtgttcattctaaattatgtagcgtaaacaaatgtgatcgtccagaccttttctatttttctttgtacagaggtcatgtactctgggtgtgttttaaaagaaacattttaaagaaacccacagattgacattttctatcttttcgttttctcacgattctctgcaatttttccatgtactaaacacaacagaaactggactgttttgtatagaatactgcttccagctaaaaccatcacaagtgcccgggagtttatgtggacatgatagatactctgggcggtaataatgcatgaacctgttttataaactcttgaactgtgtattgccatgtaaaatatgtacagtattaatgtcaaccatctctttaaaagttagcctatgaacattgttgtataatttctttggtcagaaacatttggactaagtcatgtcacctgggtcaggattttcttcaatgccgtgtagcaaaactgtctttagtctatgcaaatagcgagtcactgagtgtgacagaatgcaacttcactgttaaacttcacctgagggttcctcattctggaatccagactgcaagattataaaggaaaagacctaaggcaattcagttctttttgcaaatcaattgaatccacgagagatgtctaccagcgagatgtttaccagcccagccgcctgcagcctgcagcctgctgtgtgtgcttatttgtgcgctgaataaaatggggcagctaaattctccagttccatatgcctccgaagttcaaagaaaagaaagcaaagtaacatgttagacttgacttgtgtggcggggtaaagaaatggcatcttcccactaagaacgaaccatccagttcttttgtcagtcacactatgaaacagggaaggtgaagggaagaaatggttatgtgtgcacgaatcgctttgcatggtctcatgagatggctgcattcgaactgttttaagaattgtaaggatcttgacttttttacatttggaaacatcaaataaaaacaaacataatctgtgaaaaaaaaaaaaaaaaaaaaaaaaa

SEQ ID NO: 3802 - DNA, 573 bp, Rattus norvegicus
  Genbank Accession No. NM_053602
gcttcctgtccggtgagcgtcgaacgactgaagcggtggcccatagtgcattgcgatggcgggtaggcgtgtgtaggcggagccagggccggaagtagaacggtggcggcggcggtgactctggcagctcgggactcagtgcaagtaccacagactcaaccatgactgttcagaggatcttcaggctctcctctgtccttcggtcagcagtctctgtgcatttgaggaggaacattggtgttacagctgtggcgtttaataaggaacttgatcctgtacagaaactcttcttggacaagataagagagtacaaagcaaagcgactggcgtctggaggacctgttgatactggcccagaatatcagcaagaggtggacagagagctttttaagcttaaacaaatgtatggtaaaggagagatggataagtttcctaccttcaattttgaggatcccaaatttgaagtcctcgacaaaccccagtcctgaggaacatacaaaccatgtggtaatttgtcatgacttagttgtacaattaatctaaaaaattcaaataaacattcacttcacagct

SEQ ID NO: 3803 - DNA, 2454 bp, Rattus norvegicus
  Genbank Accession No. NM_053607
gacggaggcagctgaatgtggtgctgaaccaacaacatctagctacaaggggagccactcctccacccagcgactgtgactgttctcacaggtctgaatttcctgttggtattcacaaagatgctttttatttttaacttcttgttttccccacttccgaccccggccctgatctgcctcctgacatttggaacggctatcttcctgtggctgatcaacagacctcagccagtcttacctctcattgacttggacaaccagtctgtagggattgagggaggagcacggagaggcgctttccagaagaacaatgacctaatcctttattacttctcagacgccaagacgttgtatgaagttttccaaagaggacttgctgtgtctgacaatggaccttgcttgggatacagaaagccgaaccagccctacaagtggatatcctacaagcaggtgtctgatcgagcagagtacctgggctcctgtcttttgcataaaggatacaagccatcgcaggaccaatttattggcatctttgctcaaaataggccagagtgggtcatctccgagttagcctgttacacatattccatggtagctgtccccctgtatgacacactgggagcagaagccatcatctatgtcatcaacagagctgatatctccgtggtgatctgtgatacaccccaaaaagcaacaatgctgatagaaaatgtggaaaaggaccttaccccaggcctgaagacagtcatcctcatggaccctttcgatgatgacctgatgaaacgaggagagaagtgtggcattgagatgttgtctctgcatgatgctgagaatctaggcaaagagaacttcaaaaaaccaatgcctccgaacccagaggatctaagtgttatctgtttcaccagtggaactacaggtgaccccaaaggagctatgctgacccatcaaaatatcgtttcaaacatggctgctttcctcaaatttctggagcctatcttccagcccacccccgaggatgtgaccatatcctaccttcccttggcccatatgtttgagaggcttgtccagggtgtcatattttcctgtggaggcaaaattgggttcttccaaggagatatccggttgctacctgatgacatgaaggctttgaaacccacagtgtttcccacagtgcctcgactccttaacagggtctatgataaggtacaaaatgaagccaagacacctttgaaaaagttcttattgaacttggctatcatcagcaaattcaacgaagtgagaaatggcatcattcggcggaacagtttgtgggacaagctcgtgttttcaaagatccaaagcagcctgggtgggaaggttcgtctcatgatcactggagccgcccctatctccactccagtcttgacgttcttcagggctgcaatgggatgctgggtgtttgaagcttacggccaaacagaatgcacagctgggtgttccattacatcacctggggactggacagcaggtcatgttgggactccggtgtcctgcaattttgtcaagctggaagatgtggctgacatgaactacttttcagtaaacaacgaaggcgagatctgcatcaaaggcaacaatgtgttcaaaggctacctaaaggacccagagaagacacaggaagtactggacaaggatggctggcttcacactggggacatcggtcgctggcttccaaatggaactctgaaaatcattgaccggaagaagaatattttcaaattggcacaaggagaatacatcgctccagagaagattgaaaatgtttattccaggagcagaccaatattgcaagtttttgtccatggggagagcttacggtcattcctgataggagtggtggttcctgacccagagtcacttccctcatttgcagccaagatcggggtaaagggatcctttgaagaactatgccaaaaccagtgtgtaaagaaagccattttagaagatttgcagaaagttgggaaagaaggtggccttaaatcctttgagcaggtcaagagcatctttgtgcatccggagccgttctcaattgaaaacgggcttctgacaccgacactgaaagccaaacgagtggagcttgccaagttcttccagacacaaatcaagagcctctatgagagcatcgaagagtaacttaaggttgctgagctggaagcggtgggggacgaagcggaaactatgtccagcgaacttttccagtaaatgaagcaatcactaaaggactgtcctgagttgggagcaaagcaacgtggacgagctcgatgtgacgcctgcactgcaggcgtcttctgtgatggaagctctggatctttctccttggacttcagtccctgcagtattttgctgccagatagcatgtggtgcctctacctgtaaatgtcagatctttgaaataaactattacagctcgtgccg

SEQ ID NO: 3804 - DNA, 978 bp, Rattus norvegicus
  Genbank Accession No. NM_053615
atggcgagcagcagcggctccaaggccgaatttatcgtcggtgggaaatacaaactggtgcggaagatcggatctggttccttcggggacatttatctagcgatcaacatcaccaatggcgaggaagtggcagtgaaactagaatcccagaaggccaggcatccccagttgctgtacgagagcaaactgtataagattcttcaaggtggggttggcatccctcacatacggtggtatgggcaaggaaaagactataatgtgctagtcatggatcttctgggacccagcctcgaagacctcttcaatttctgttcaagaaggttcactatgaagactgtacttatgttagctgaccagatgatcagtagaattgaatatgtgcatacaaagaattttatacacagagacattaaaccagataacttcctaatgggtattgggcgtcactgtaataagttattccttattgattttggtttggccaaaaagtacagagacaacaggacaaggcaacacataccatacagggaagataaaaacctcactggcactgcccggtatgccagcatcaatgcacatcttggcattgagcagagtcgccgagatgacatggaatctttaggatatgttttgatgtattttaatagaaccagtctgccatggcaagggctaaaggctgcaacaaagaaacaaaaatatgaaaagattagtgaaaagaagatgtccactcctgttgaagttttgtgtaaggggtttcctgcagaatttgccatgtacttaaattactgtcgtgggctgcgctttgaggaagctccggattacatgtatctgaggcagctgttccgcatcctcttcaggaccctgaaccaccagtatgactacacgtttgattggacgatgttaaagcagaaagcagcccagcaggcagcctcttccagtgggcagggtcagcaggcccaaacccccacaggtttctaa

SEQ ID NO: 3805 - DNA, 5333 bp, Rattus norvegicus
  Genbank Accession No. NM_053620
cacgggcagcgagaggccggcgcgtggggagcgggccggcgcggcaccatgtcggccaaggtgcggctcaagaagctggagcagctgctcctggacgggccgtggcgcaatgagagctccctgagcgtggagacgctgctggacgtgctggtgtgcctttacaccgagtgcagccactcggcgctgcgccgcgacaagtatgtggcggagttcctcgagtgggctaagccattcacccagctcgtgaaggacatgcagcttcatcgggaggactttgagatcatcaaagtgattggaagaggagcttttggtgaggttgctgttgtcaaaatgaagaacactgaacgaatttatgcaatgaaaattctcaacaaatgggagatgctaaagagagcagagacagcttgctttcgagaagagagggatgtgctggtgaacggtgactgccagtggatcactgcgctacactacgcctttcaagatgagaactacctgtacttggttatggattactatgtgggtggtgacttgctgaccctgctgagtaagtttgaagacaaacttccagaagacatggcgaggttctacattggcgagatggtgttggccatcgactcgatccaccagctccactatgtgcacagagacattaaacccgacaacgtccttctggatgtcaacggtcacatccgcctggctgactttggctcgtgcttgaagatgaacgatgacggcactgttcagtcttccgtggctgtgggcacacctgactacatctcaccagagatcctgcaggccatggaggatggcatgggcaaatacgggcccgagtgcgactggtggtccctgggcgtctgcatgtatgagatgctgtatggagaaacgccattttatgcagagtctctggtggagacatatggaaagatcatgaaccacgaggagcggtttcagttcccatcccacgtcactgacgtctctgaagaagcgaaagacctcatccagagactaatatgcagcagagagcgccggctcgggcagaacgggatagaggactttaagaaacatgcattctttgaaggtctaaattgggaaaatatacggaacctggaagcaccctacattcccgatgtgagcagcccttctgacacgtccaacttcgatgtggacgatgacgtgctgagaaacatcgaaatcttacctcccggctctcacacgggcttctcgggactgcacctacccttcattggctttacatttacgacagaaagctgcttttctgaccgaggctctctgaagagcatgatacagtctaacacgctaaccaaagatgaggatgtgcagcgggatttggagaacagcttgcagatcgaagcttacgagcgaaggatacgaaggctggaacaggagaagctagagctgagccggaagctgcaagagtccacccagactgtgcagtcccttcacggttccacacgggccctgggcaactcaaaccgtgacaaggaaatcaagaggctgaatgaagagcttgaacgcatgaagagtaaaatggcagattcaaacaggctcgaacgacagctcgaggataccgtgacccttcgccaggagcatgaagactccacacaacggctgaagggcctggagaagcagtaccgcctggcacggcaggagaaggaagaattgcacaagcaattggttgaagcttcagagcgattgaaatcccagaccaaagaactcaaagatgctcatcagcagcgaaaacgggccctgcaggagttttcagagctcaatgagcgcatggcagagctgaggtcacagaagcagaaggtgtcccggcagctccgtgacaaggaggaggagatggaggtggccatgcagaagattgactccatgaggcaggatatccgcaagtctgagaagtctaggaaagagctggaagctcggcttgaggacgcagtcgctgaggcctccaaggagaggaagcttcgagagcacagtgagagcttctctaagcagatggagcgcgagctcgagaccctcaaggtgaagcaaggaggccgggggccgggtgccacgttagaacatcagcaggagatctccaaaatcaggtcagagcttgagaagaaagtcttgttctatgaggaggagttggtccgccgagagcgctcccatgtgctagaagtaaagaatgtgaagaaggaggtgcacgaatctgaaagccaccagttggccctgcagaaagaggtcctgatgctgaaagataagttagaaaagtcaaaacgagaacggcacagtgagatggaggaggccataggtgccatgaaagacaagtacgaacgggagagggccatgctgttcgacgagaacaagaagttaacagcagaaaacgaaaagctctgttcctttgtggataaactaacagcccaaaacagacagctggaggacgagctgcaggacctggcctccaagaaggagtcggtcgctcactgggaggcgcagattgcagagattattcagtgggtcagcgatgagaaagatgccagaggctaccttcaagcacttgcttctaagatgaccgaagagcttgagactttgagaagctctagtttgggatccaggacactggacccactctggaaggtccgtcggagccagaagctggacatgtctgcgcggctggagttgcagtccgctctcgaggcagagatccgtgccaagcagctggttcacgaggagctgaggaaggtcaaagacaccagcctagccttcgaaagcaaactgaaggagtcagaagccaaaaacagggaattattagaagaaatgcaaagtctgaagaaaaggatggaagaaaaatttagagcagatacagggctcaaacttccagatttccaggatcctatctttgagtacttcaacactgctcctcttgcacatgacctgacttttagaactagctcagctagtgatcaggaaacacaggcttcaaagttggacttgtccccatcagtgtctgtggccacaagcacagaacagcaggaggatgcggctcgttcacagcagaggccgtctactgtgccgctgcccaacacacaggccctcgccatggctggaccaaagcccaaggcacaccagttcagcatcaagtccttccccagccccacccagtgtagccactgtacgtccttgatggttgggctgatccgacagggctatgcctgtgaggtctgcgcgttttcctgccatgtgtcctgcaaagacagcgctccccaggtgtgccccatacctcctgagcagtccaagcggcctctcggcgtagacgtgcagaggggcataggcacagcctacaagggctacgtcaaggtcccgaagcccacaggcgtgaagaaagggtggcagcgggcttacgcagtggtctgtgactgcaagctcttcctgtacgacctgccagaagggaagtccacccagcctggggtcatcgccagtcaagtcttagacctcagagatgacgagtttgctgtgagctcagtcctggcctcagatgtcatccatgctacacgccgagacatcccgtgtatattcagggtgacggcctctctcttaggttcaccttctaagaccagctcactgctcatcctgacagagaacgagaatgaaaagaggaagtgggttgggatcctggaagggctgcaggctatcctccacaagaaccggctgaggagccaggtggtgcacgtggcacaggaagcgtacgacagctcactgccgctcatcaagaccgtcctggctgccgctattgtggatggagacagaattgcggtcggcctggaagaagggctctacgtcattgagctcacccgagatgtgatcgtccgcgctgctgactgcaagaaggtataccagatcgagctggcgcccaaggagaagctcatcctcctcctctgtggccggaaccaccacgtgcacctctacccctggacctccttcgatggagcagaagctagcaactttgacatcaagctcccagaaacgaagggctgccagctcatagcaacagggacgctgaggaagagctcgtccacctgcctgtttgtcgccgtgaagcggctggtcctttgctacgagatccagagaactaagcctttccaccggaagttcaatgagatcgtggccccgggacatgtgcagtggatggccatgttcaaggacaggctctgtgttggctacccctccgggttctctctgttgagcatccagggggacgggcagcctctagacctggtaaatcccgctgacccctcgctcgcgttcctctcacagcagtctttcgatgccctctgtgctgtagagctcaaaagtgaggagtacctgctctgcttcagccacatgggactgtacgtggaccctcaaggtcggaggtcacgcacgcaggagctcatgtggcctgcggctcctgtcgcctgtagttgcagctcctcccacgtcacggtgtacagcgaatacggggtggatgtcttcgacgtgcgcaccatggagtgggttcagaccatcggcctgcggaggataagacctctgaactctgatggtagcctcaacctgctgggctgtgagcccccatgcctcatctacttcaaaaacaagttctcaggcaccgtcctcaatgtgcccgatacctcggacaacagcaagaagcagatgctgcggacgcggagcaaacggcgcttcgtcttcaaggttccagaggaagagaggctgcagcagcggcgagagatgctcagagacccggaactgagatccaaaatgatatccaatccgaccaacttcaaccacgtggctcacatgggccctggcgatgggatgcaggtgctcatggacctgcctctgagcgtgcgcccacagcccaggaggaaaagcagggtcctgccccaacaggcctccctcggcagcctcccatccaggaacaagccctatgtctcatggccgtcctcaggtgggtctgagcctggagtgcctgtgcctctgaggagcatgtctgaccccgaccaggattttgacaaagagcctgactctgactccacgaagcactcactccgtccaacagctccaaccctagcggccccccgagccccaactcaccgcaccggagccagctccctctgaaggcctggaccagccagcctgcgacgcctgaggccgccagcatagcaccatagggccagggagccagatggccccaacatcagtgccaagactgagctgaccctccagtgttgtccaaggaaatgtagaatcagtttgtagatagataaatgaatctttaattatatgatcagttt

SEQ ID NO: 3806 - DNA, 4862 bp, Rattus norvegicus
  Genbank Accession No. NM_053623
gccgaggctcgcccctccttgcaaggctgctccagagctagcgggcacgcgagctcctctccgggagcttccttccccgaaaggccgggacccagtggcggactcgtggtgagcgaggcagcaccttcgatcccaggagattgacctgttcttaaaagtgaaagaagaaatctaagaaaaacgctatggcaaagagaataaaagctaagcccacttcagacaaacccggaagtccatatcgctctgtcacgcacttcgactcactagctgtcatagacatccctggagcagatactctggataaattatttgaccatgctgtagccaagtttgggaagaaggacagcctggggacccgggagatcctgagcgaagaaaatgaaatgcagccaaatggaaaggtttttaagaagttaattcttgggaattataaatggataaactatcttgaagtgaactgccgagtgaataactttggaagtggcctcactgcactgggactgaaaccaaagaacaccattgccattttctgtgagaccagggcggagtggatgattgcagcgcagacctgctttaagtacaactttccgcttgtgactttatatgctacccttggcaaagaagctgtcgttcatggattaaatgagtctgaggcttcctatctgattactagtgttgaacttctggaaagcaaactgaaggcggcattattagatatcaattgtgttaaacatatcatttatgtggataacaagactatcaatagagcggagtaccccgaggggcttgagattcacagcatgcagtcagtagaggagctgggatccaagccagaaaactcaagcattcctccaagtagaccaactccttcggacatggccattgtcatgtacaccagtggctctactggccgccccaagggagtgatgatgcaccatagcaatctgatagctgggatgacaggccagtgtgagcgcatacctggattaggaccaaaggacacatatattggctacttacctttggctcatgtgctggaactgacagcagagatctcctgctttacctacggctgtaggattggatattcgtcaccactcacactgtctgaccagtccagcaaaatcaagaagggaagcaagggtgattgtactgtactgaaacctacacttatggcggccgttccggaaatcatggatagaatttacaagaatgttatgagcaaggttcaagagatgaattatattcagaagactctatttaaaattgggtatgattataaattagagcaaatcaagaaaggatatgatgcccctctttgtaatctgatactgtttaagaaggtgaaggctcttctaggaggaaatgtccgcatgatgctgtccggcggtgccccactgtccccccagacacaccgattcatgaatgtctgcttctgctgccccattggtcagggctatgggctgacagaatcatgcggtgctggaacagttactgaagttaccgactacactactggaagagttggcgctcctcttatttgctgtgaaattaaactgaaggactggcaggaaggtggttatacagttcatgataagccaaaccccagaggtgaaattgtgattggaggccagaatatctccatgggatattttaaaaatgaagagaaaacagcagaagattattctgtggatgaaaatggacaaaggtggttttgcactggtgatattggagaattccaccctgatggatgcttacagattatcgatcgtaagaaagatctggtgaagctgcaagccggagagtacgtgtctcttgggaaagtcgaagccgcactgaagaattgtccactgatcgacaacatctgtgcttttgccaaaagtgaccagtcttatgtgatcagttttgtggttcccaaccagaaaaagttgactcttttggcacaacagaagggggtagaaggatcttgggttgatatttgcaataatcctgccatggaagctgaaatactgaaagaaattcgagaagctgcaaatgccatgaaattggaacgatttgaaattccaatcaaagttcgattgagcccagagccatggacccctgaaactggtttggtaacagatgccttcaagctgaaaaggaaggaactgaagaaccattatcttaaagacattgagcggatgtatgggggcaaataaaaggcaactgtctacttcacatttgcacaggaggtggcctgatggtttttttagttctagagtttaagcctttgttgatctctctgttaaaatgtaaggtgaatcttctaaagacatgaaacaaaaaaacaaccaaaagtggttacaataaattgcatagtcctagagaagctgaaattgaagacatttccctttagctgtgttattaagtttagagcaaaaattctgttttagaatattagccttagctacacttgtttttctaaagatactccatgctaaagtaaacaaattggacttggactaggtgtagttgaagaaatctacagcttccagtgtctatgtcttcctagttcagaagtttctatcgtaatcattaggacaaaattacgtattaacactactcaaagccgaagttccaccaggctttgaaatcctcttccaaccatttctcttgaagggaaaaaaatcagttgtaataaatggattcagtatcttagaaggtattattttaagctcataattgccatgtaggtgagacatagaatcattataatattgtgaataattacagtgcctgaagttaaaactaaaacaacacacacataccaaaaatatctcataatgtatttgaagggaggctgaattgctcctttggatgtctaagaacttaaatcagcaactgtaattattgaaatgtcttcagaaaaatgtccactttgtaaaagtgacctttctgtgtgtgatctagtcaaaggctgagaccaaggggaacatgttagaaagtcaatcagaattcaataagatacattgcttttctgttagaaagttcatggcatcctaagcattcagaattaggatcctggcatagcactgagcctgggaaagagatttagcctctttaactttgataccagggcttgattttaaaatgtgcttgtattaaattacatttgtaatttatggtctgtttgctgttgctgattgattcttgatcagtagtgtgcatttcagagagcctttcattttgctttaatttcagcaaagcgggttatgataaatgacttcctcgaatcttgttcaaacctacgggtgattaagtgtcttggatgagtctgaggaagttaaagggaagaaaacactgttaacacttttcctgtttgtgaagagtttagaaactggaaatgctagatttgggagaagggcagagttacttgattaaggactgtctgtgcagtaacttgggagtgtgagtttctttttaaatcttcagctaaaatctggaattatatattcttgatagatattcgcacttgaaccatagttactgtatgtaaaaagcaaaaattcttaatactgttattctttgcacttttttcatagtcattttatacacacacacacacacatgcatgtgtatgtgtgtgtgtatatataatatatatatgttgcttacattgtgttgtacagatgtgggccaccactacaacaaaatgagttctttgtgctctaaaatatttataaagaaattatttaaatgttatgtatatggtggtaatattgagaaaaaaaatcatctggtattctgagcaacagcgaaggtttttgtaaaagtttcttttcagtgttgtgcaaactaaaatttgaggcaagttttccctgaagttctatgtgagtattctcatgcttcccatcttgcctttgaagtgtgaaaagacatcaagtagactactagtcagcttctacctactcctagtgcactgtttatccgtttttttttaaaggcttttccaatatatgtatcccatttggaatggtgattttaaaatgtgagtgcatgcagactatcttacttaagatacttgcaccccacccacagccatctcccaaagctggaacactgccaactaggtccttaagaatcacgcattgaatacaaggtcgggtgctgctaattcttcatgaaaatcctaacacacacgttaagggaccagggagatgccactgccctctgacttttcatcaaaaaaaaaatatatatatacatgtttatgtaaacagaactattttccatattcatagtgactttttaagtatttgagcctaaaggttttgatctccattttatacctatttaaatcgttcacaatttcatgtcagccatcaattaaagctgtgcttactgttgattgtgtgtgcatttctaaggtgaacgctcctaattttttgctttaattacatgaaagggtcttatttctttgatatttgtgctcttttttttaatgtagactgaaggtatgattgtgtgacttttaagaaatgaaataccgatgaatgatccatagagtccaaagtgagggagaatgctgtttctttgttcatagagactgactagtaatctttgcctatattttcctggtagcagatgacaaatgtttctacagtgacaagctgagaagaggttaaaggttaaagattgtgtggcattcgggaactggagagatacgttttaattttgaatgtagttacaaattttatattcatatttgtactttctgttaatgcacgattgtagaattgttctgtagattttttgtgtttactcttgaaaggctttgtttgttcttctttttaagtttgcacttgaatcttataaaataaatc

SEQ ID NO: 3807 - DNA, 1646 bp, Rattus norvegicus
  Genbank Accession No. NM_053626
caacgcagcccagaatcaggagcaatcctgctggagacaggttcctgcacccccaggccatttttctctagacacttggcaccagcggctggggtgatgcgcgtggccgtgattggagcgggagtcatcggactgtctacagccctctgcattcatgaacgttaccacccagcccaacctctgcacatgaagatctatgcggatcgcttcacgccgttcactaccagcgatgtggctgcgggactctggcagccttatctctctgaccccagcaacccgcaggaggcggagtggaaccagcaaactttcgatcaccttcagagctgcctccattctccaaacgctgagaaaatgggcttggccctaatctcaggctacaacctcttccgagacgaagtcccggaccctttctggaaaagcacagttctgggattccggaagctgacccccagcgagttggacatgttccctgattatagctatggctggttcaacacgagcctccttcttgaggggaagagctacctatcatggctgactgagaggttaactgagaggggagtgaagttcatccatcggaaggtggcatctttcgaagaggtggtgagaggaggcgtggatgtgattatcaactgcaccggggtgtgggccggggctctgcaagcagacgcctccctgcagccaggccggggccagatcatccaggtggaggccccttggataaagcacttcatcctcacccatgatcccagccttggcatctacaactctccatacatcatcccaggttccaagacagttacactcggaggtgtattccagctggggaactggagcgagctaaacagcgtccatgaccacaacaccatttggaagagctgctgtcaactggagcccaccctgaagaatgcaagaatcatgggtgaactcactggcttccggccagtccgacctcaggtccggctagaaagagaacgccttcgctttggatcttcaagtgcagaggtcatccataactatggtcatggaggttacgggctcacgattcactggggttgtgcaatggaggcagccaacctctttgggaaaattctagaagaaaagaacttgtccaggatgcctccatcccacctctgaggactctggtgaataccacttgccccaagacgacatcccaaccccttcagccagttgacaccatccttgatgattccctcccccagccccagcccctcctccagcacccccttggcaaaggcctgaagggaggaaatcctgctgttccctctctgcctagtccttccagggcagtgatgctggttggttctaaccaaggctgcatgagacaggcgagatctacaaccatgatgcaattcttctcacgctgcaacgactgtactaaggctggtcctactgggtggcagggtctgtgttcagtctgatagagtagtctggaatcttttgcttagaactctgatgaacggttcacgacactatccatgtctatttgtagtgatggagtgatgggaggagagggaggaagaagaggaggagggggagggggaggagggggaggagggggaggaggaggagggctccctcttcagcactctgctggtcaacatcattaaagcactgaatatcca

SEQ ID NO: 3808 - DNA, 733 bp, Rattus norvegicus
  Genbank Accession No. NM_053631
aacgttctagctgcttgaggtatcggcgggagtagctgagtggcgcgaggagccgttaccagagccggagctgctggttaatcctgatcaagatgacaacctctcaaaagcaccgagacttcgtggcagagcccatgggggaaaagccagtggggagcctggccgggattggtgatgccctgggcaagaggctggaggaaaggggctttgacaaggcgtatgtggtccttggccagtttctggtactaaagaaagatgaagacctctttcgagaatggctaaaagacacatgtggtgccaatgccaagcagtcccgggactgctttgggtgccttcgagaatggtgtgatgccttcttgtaatgttctctggggacccctcagcccccctagccacagcatagaatctccagagtctgcagcagggcagggtgcctccctgtcctccacgaaggaaaagattgctgttgtcaccctcatctcctatgtactccagggtcttttgggagttctctccccccagcatttcaacctttctgggtttcttgccctcgcatgccttccccttcccctccccctacagttccatggcagcagttcccagccttcctgaatggattactgcctccttctccctcaccatctgttggatgccctttgactccttttttttttggcaaaaacagtcactgtctttataaaagatttttaaattaataaagctagtggccttc

SEQ ID NO: 3809 - DNA, 2449 bp, Rattus norvegicus
  Genbank Accession No. NM_053638
ccacgcgtccgggggatcggacgcgtgctgtcgccgcggtgagggaagtggacgcgatggccgggtccgcgtgggtgtccaaggtctctcggctgctgggtgccttccacaacacaaaacaggtgacaagaggttttgctggtggcgttcagacagtaactctaattcctggagatggaattggcccagaaatttcagcctcagttatgaagatttttgatgccgccaaagcacctattcagtgggaggagcggaacgtcacagcgattcaaggaccaggaggaaagtggatgatccctccagaagccaaagagtccatggataagaacaagatgggcttgaaaggcccactgaagaccccaatagcagctggccatccatctatgaatctgttgcttcgtaagacatttgatctttatgccaatgtccggccatgtgtctcaattgaaggttacaaaaccccttacacagatgtaaatattgtcaccatccgagagaacacagaaggagaatacagtggaattgagcatgtgatcgtcgatggggttgtgcagagcatcaagctcatcactgaaggagcaagcaagcgcattgccgagtttgcctttgagtacgcgaggaacaaccacaggagcaatgtcacagctgtgcacaaggccaacatcatgaggatgtcagatgggctctttctgcaaaaatgcagggaagttgcagagaactgtaaagacattaagtttaatgagatgtacctcgacactgtatgtttgaatatggtacaagacccgtcccagttcgatgttcttgtcatgccaaatttatatggagacatccttagtgatctgtgtgcaggactgattggaggtcttggtgtgactcaaagtggcaatattggagccaacggtgttgccatctttgaatcggttcacgggacagccccggacattgcaggcaaggacatggccaaccccacggccctgctgctcagtgctgtgatgatgctgcgtcacatgggcctctttgaccacgcagcaaaaatcgaggctgcgtgttttgctacaattaaggatgggaagagcttaacaaaagatctgggaggcaactcgaagtgctctgacttcacagaagaaatctgtcgtagagtaaaagacttagattagcacttctggggatttgctgcagtccgtccgtcactccagggggatgccctgtaatcctccttgagagcgcccaccattggtttgcttgcttcgtgacagagcacatttcaaatctggctttttcctaacaaaacccttgcaatggatgcacacaatgccctaggcctttgtgcaaaggttcccaagtgcttgtatttattgtctgtctggtaaacctgttttgtaaactataagtgaactgtatcatttatcattgttaacccattttacacctcaggcaaaataatttttcctcaactgtaaatattctgatacagaattaagagaagatatttaactttttaacaaaagccctggatttttggtttatgcaaaacagctgggagtaaaacagggtttcaacaatcgcacaagataatgttattctaaaaatagtgggcacaaaagaaatttactgggaaagttcacagcaaaaatgatatatttcttaaaaatatggaagtaaagatatttgtcctatacatgaattactactaataaaaatgtaagctccaagaaacccataagaacggaagtaattttatttaatatatagataatccttgtcaaagccccagatgctctgtgtatttgattattttgttacttgagatttactattttggggggaagagctctcagacagggagatcactcctcttcactagactaatcatcagcagttgtcagtcagaggagccagccactgcagattccctcccacatgaccacactccagccagggctgcaggtgaccctggaaaggcctggctgccccttcacttcctaaagcaagcgtcactgccctatgcctcagtagtacccgttaaagacttaattgcagaggtggggtttactcaatccaaactgacacaaatcaggccaagctggggcctgtgtagccagcttctgaccatcagtttctgcccctccctctcccacccctgtcccttcccacagcctctgcaccacagcatgaaaatacccttcggcccataccaaagccaagctgttttccctagccgacagttgcaacccatggcttgcataagtaccctggccacaggggatttcttaacaacagatacccatgtctgggtcattttttaaagcttttatttggactcacagtcgtctctgtattttactttaaaaccgctgctttccctgtcttactggattgttctggttaccagtggctttgggtccacagtaataaagaacttaagaactgtcaaaaaaaaaaaaaaaaa

SEQ ID NO: 3810 - DNA, 2207 bp, Rattus norvegicus
  Genbank Accession No. NM_053648
cattttagaggcactatttctagtacaatgggtatgaagctgtgatttgagccgcaaatttcagagcattggccatagaacagacctggtcggtttgatgtcactgtagcttggtttaggcggccggggattgcgtcggtttttaaccctagtgaagggacggctcatgagtgcaggacgtcttcggatgagattagtatacgaattggaagttctattggtaagactacccgattatcaacttctaatagacgaagctcacctggttttaggtcgggacagatggaggcatcaaggagcagagggcaggaagacaggacgctttgagcacacggggctttgtgtctattccactgacaacctcctcactgccacccaccggttccatggagataatatttggccggaataagaaagaacagctggagccattacgggccacagtgacaggcagcattccagcatggctgcaggggaccctgctccgaaacgggcctgggatgcacacagtgggagacagcaagtacaaccattggtttgatggcctggcccttctccacagtttctccatcagagatggggaggtcttctacaggagcaaatacctgcagagcgacacctacaacgccaacatcgaggccaatagaatcgtggtgtctgagttcggaacaatggcctacccagacccctgcaaaaacatcttttccaaagctttctcctacttgtcccacaccatccccgacttcacagacaactgcctgattaacatcatgaaatgtggagaagacttctatgccaccacagagaccaactacatcaggaaaatcgacccccagactctagagaccttggagaaggttgattaccggaagtatgtggctgtaaacctggctacctcacaccctcattacgacgaggctggaaatgtccttaacatgggtacctccatcgcggacaaaggagggacaaaatacgtgatgtttaagatccccgccacagcaccaggcagcaagaagaaagggaagaaccccttgaagcactcagaagttttctgctccatcccgtcccgctcgctgctctcccccagttactaccacagctttggagtcacggagaactatgtggtgtttctggagcagccttttaagctggatatcctcaagatggccaccgcatacatgaggggtgtgagctgggcttcctgtatgacattctgcaaggaggacaagacttacattcatatcatcgaccagaagaccagaaagcctgtgccaaccaaattctacacagaccccatggtggtcttccaccatgttaatgcctatgaggaggacggctgtgtgctgtttgatgtcatcgcctatgaggacaacagtctctatcagctcttctacctggccaacctgaacaaggacttcgaggagaagtccaggctgacctcagtgcctaccctcaggaggtttgctgtgcccctccacgtggacaaggatgcagaagtgggctcgaatttagtcaaggtgtcatctacaacagcaactgccctgaaggagaaggacgaccatgtctactgccagcctgaggtcctctacgaaggcctagagctccctcggataaattatgctcacaacgggaagccatatcgctacatctttgctgctgaagtacaatggagtccagtcccaaccaagatactaaaatatgacgttctcaccaagtcctccttaaagtggtccgaggagagctgctggcctgcagagcctctgtttgtccccacaccgggtgcgaaggatgaggatgatggagtcatcttatcagccatcatctctacagatccccaaaagctgccctttttacttattctggatgcgaaaagttttacggaattggctcgcgcctctgttgatgtggacatgcacctggacctgcatggtttatttattccggatgcaggctggaatgcagtgaagcagactccagccaaaacgcaagaggatgaaaattcagatcatcccacaggtctgacagcaccaggattgggccatggtgaaaatgacttcacggcaggtcatggcggcaagagcctttaatcctagcactcgaggcagaggcaagcagatctctgagttcaaggccagcctggtctacaacacaagttccaggacagccagggatacacagagaaatcctatcttgaaaacaaagcaaag

SEQ ID NO: 3811 - DNA, 2092 bp, Rattus norvegicus
  Genbank Accession No. NM_053662
agtctcgctttgggttccggctgcgtcgggcgtgcgtgtagctcgctagaactatggcgtccgggcctcacccgacatcgaccgctgccgccgcctctgcctcgtccgccgccccgagtgcgggcggctccagctccggcacgacgaccacgacgacgacgacgaccggagggatcctgattggcgaccgcctgtactcggaggtgtcgcttaccatcgaccactcggtgattccggaggagcggctctcgcctaccccgtccatgcaggacggcctcgacctgcccagcgagacggacctgcgcatcttaggctgcgagctcatccaggccgccggcattctcctccggctgccgcaggtggcgatggctacggggcaggtgttgtttcatcgttttttctactccaagtctttcgtcaaacacagtttcgagattgttgccatggcctgtattaatcttgcatcaaaaattgaagaagcaccaagaagaataagagatgtgattaatgtattccaccacctccgccagttaagaggaaaaaggactccaagccccctgatccttgatcagaactacattaacaccaaaaatcaagttatcaaggcagagaggagggtgctaaaggagttgggattttgtgttcatgtcaagcatccccataagatcattgtaatgtatttacaagtcttagaatgtgaacgtaaccaaaccctggttcagactgcctggaattatatgaatgacagtcttcgaaccaatgtttttgttcgctttcaaccagagactatagcatgtgcttgtatctaccttgcagctagagcacttcaaattccattgccaactcggccccattggtttcttctttttggtaccacagaagaggagattcaagaaatctgcatagagacacttagactttataccaggaaaaagcctaactatgaattgctggaaaaggaagtagaaaaaagaaaagtagccttacaggaagccaagttaaaggcaaagggattgaatcttgatggaactccagccctttccactttaggtggtttttctccagcctccaaaccatcatcaccaagagaagtaaaagctgaagagaaatcaccagtttccattaatgtgaagacagtcaaaaaagaacctgaggatagacaacaagcttccaaaagcccttataatggtgtaagaaaagacagcaagagaagcagaaacagcagaagtgccagtagatcaaggtcaagaaccaggtcacgctctagatcacacaccccaagaagacattataataataggcgaagtcgatctggaacatacagctcaagatcaagaagcaggtctcgcagtcacagtgaaagtcctcgaagacatcataatcatggttctcctcaccttaaggccaaacataccagagaagatttaaaaagctcaaatagacatggtcataaaaggaaaaaatctcggtctcgatctcagagcaagactcgggatcactcagatgttaccaagaaacacaggcatgaaagggggcatcacagagacaggcgtgaaagatctcgctcctttgagaggtcccataaaggcaagcaccacggtggaagtcgctcaggacatggcaggcataggcgctgactttcatcctctgacactgcatcggtccctggtgttgcccatatgcagtgtgacgatgtatggactcaatcaaaacatgaaaagcaaactgattagggattgatttattaaaattgtctaggtttctagaaacactgaggacattttcttttgaaaagaactatgttaaggttttttgcacattaaaatgccctagcagtatctaattgaaaaccatggtcaggttcaattgtactttattatagttgtgtattgtttattgctataagaactggagcgtaaattctgtaaaaatgtatcttatttttatacagataaaacttgcagacactgttctatttaagtggttatttgtttaaatgatggtgaatactttcttaacactggtttgtccgcatgtgtaaagatttttacaaggaaataaaatacaaatcttgtttttctaaaaaaaaaaa

SEQ ID NO: 3812 - DNA, 1408 bp, Rattus norvegicus
  Genbank Accession No. NM_053670
gaggcagaggcaacatggaagtgaaggatgcgaacgctgccctgctcagtaactacgaggtgttccagttactgacagacctcaaagagcagcggaaggagagcgggaagaacaagcatagcgccgggcagcagaacttgaacgccatcacctacgagacattaaaatacatatcgaaaactccatgtaagaaccagagtccggcgattgtccaagaattcctcacagcaatgaagagccacaagctgaccaaagccgagaagcttcagctgctgaatcacaggccaatgaccgctgttgagatccagctgatggtggaagagagtgaagagcggctcacggaggagcagattgaagctctcctgcacactgtcaccagcatcctgcctgcaggtccagaggatgagcagagcaaaagcactagcaatgacgcggcaatggaagaggaggagcctgcatagacatctgtggccattatgacacagctggccaggttgttcgtgatgctcaaagccacaacagccatttcctggacgttcagagaactgtttattcggcctgacccctctctcaaatattcctgatctcaggattggttgagaaaaaaaatcacaaaaataagatgaaaagaaatctttgtgccttgggttcaagaaacatggggtcagagaagggcagagggctcgagatggggcagcatggctatgcagccctctgggtagaaaggcttgtgtggcctctgtcgcacttgtacacagtggggagctattcaggcactttgatgactgtgttgtaggcaatgtcaggcaccgccatagaatggagctggggaacgacctcagacggtctcgagctcccagagctgcacacagctgctccaggggaaatgacccagggcttagctcacggtagaggaatgtcctcggcagagcaggaggcaaggaaaggagataagaggaaactgcagtctgagcccagcctggtgtacataataaggaacacacatgtgaatatacctaacacacatgcgtgccacacacacacatacaaagaaattagtcccttttctgtggcaaacccacaactctctggcctgggtgagagacaaggaaaaggcttattttgactcctggttctggtccaaggtcaaagggcatctgggtatggccctcttgttgccagagtgctcaggtagcattggctaacacattacaaaacatgagaagcgtttgtttgtcttcagagtctcttgtagcccacattgaccaaagttcattctgtctgaaatcgtcagacactttctgattctttggcctcagtctccttaaagctgggattcaaatatataccactcacttaggaggcagaggccagcctggtcacacagcaagttccatgccagccagcg

SEQ ID NO: 3813 - DNA, 1155 bp, Rattus norvegicus
  Genbank Accession No. NM_053698
cacgagggttggcagctgcctggcggtcctgaggagcggctagggcagcggagggaaagaaaagggaacggctcggaatttgctccagcggctgctgcaagacctcggcgccaacctcgcaccagcgagcgccccacagcccttcggctgcccctctatgtgctgctgagccggtcctggacccgacgagcccgccttcggtgttccgagccgaaatcgcaaagacggaaggactggaaatggcagaccatatgatggccatgaaccacggtcgcttccccgacggcaccaacgggctgcaccaccaccctgcccaccgcatgggcatggggcagttcccgagcccgcatcaccaccagcagcagcagccccagcacgccttcaacgccctcatgggcgagcacatacactacggcgcgggcaacatgaatgccacgagcggcatcaggcacgccatggggccggggactgtgaacggggggcaccccccgagcgctctggccccggccgccaggtttaacaactcccagttcatgggtccccctgtggccagccagggaggctccctgccggccagcatgcagctgcagaagctcaacaaccagtatttcaaccatcacccctacccccacaaccactacatgccggatttgcaccccgctgcaggccaccagatgaacgggacaaaccagcacttccgagattgcaaccccaagcacagtggaggcagcagcacccctggcggcgcgggtggcagcggcacccccggcggctccggcggcacctcgggcggcgcgggtggcagcagcgcgggcggcagtggcggtggcagcaccatgcccgcctcggtggctcacgtccccgcggcaatgctgccgcccaatgtcatagacactgatttcatcgacgaggaagtgcttatgtccttagtgatagagatgggtttggaccgcatcaaggagctgccagaactctggctgggccaaaatgagtttgattttatgacggacttcgtgtgcaaacagcagcccagcagagtcagctgttgactcggttaacctcgcggctgaaagaaatcaccctccctgcccccacccccaacttcttcggtgtgaattaaaaaaaatcaaaaacaaacaaaaaaaaaacaaaaaa

SEQ ID NO: 3814 - DNA, 897 bp, Rattus norvegicus
  Genbank Accession No. NM_053699
cacgagggtggttttgcagtctgctactactgcggtagagcagcgcagaagagaggagatccgggagacccgcgtgagacagtgaacaaatccgatttaatcttcctctgtctggctgagttgcaggaacctcactgtgcccgggtctcccgcccaagaggagccgttggccgagacccgaggcgtgtactgactgaccgccagctgccatggctgaccacctgatgctcgccgagggctactgcctgctacaggtgccgcacgcgccccggactctgcagccatacccaggcccgggcctagacagcggtctgcggccgcggggggctccgctgggaccgccgccgccatccgggaccttggcatacggctctttcggatcgcctgtctccttccagcccttccccgtctcgcagccgccgggcgccggtaacgcgcaccttcagtctgcagctacgccgtccccgggccgcatgccggcgcccccgtcagccgcgggagggccctcacctctgcagcccgctccgggagccgcgtccccgctgccgctgccgccgccgccgccgctgccgcccgccctgggctgcatggacgcggagctcatcgacgaggaggcgctgacgtcgctggaactcgagctcgggctgcaccgtgttcgcgagctgcccgagctcttccttggccaaagcgagttcgattgcttctcggacctggggtcagtgccggccgccggctcggtgagctgttgaacgccaccaccgagagacgccggactgcgcccggtggcccggcctgcacacaccctccgtgagggtggaggcgccgggtttttgcgccgagacggctccagctgtggacacctgcctagcctccaggcctgcctcctgccggatgacg

SEQ ID NO: 3815 - DNA, 1458 bp, Rattus norvegicus
  Genbank Accession No. NM_053719
ttaccagcaagtgtgcatagggacaaacggagaccgatcgcagcaggctgagggtgcaataacgacctcctggaccgacccgcccgcgccatgcgctcgcacactggcttgagggcgcttgtggcgcctggttgctcgctcctccttctatatcttctggcggcgacgcgcccggatcgggctgtgggcgatcccgcagactcagcgtttacaagtctacctgttcgagaggaaatgatggctaagtacgcaaatctgtccttggagacctataatatctcactgacagaacagaccagagtatcagaacaaaacataactttggaaagaccttctcacctggaactcgaatgcacgttcacggcaactgaggatgtgatgtcaatgaatgtgacttggaagaaagatgacgcgctccttgagactactgatggtttcaatacaactaaaatgggggacaccttatacagtcaatacaggttcaccgtttttaatagcaaacaaatgggaaaatactcttgtttccttggagaagagctcagaggaacctttaatatcagagtacccaaagttcatgggaaaaacaagcctttgatcacttacgtgggggattctactgtgctgaagtgtgaatgtcaaaattgtcttcctttaaattggacttggtacatgagtaatggaactgcacaggttcccatcgatgttcacgtgaatgataagtttgatataaatggttcctatgctaacgaaacaaagctcaaggtaaagcaccttttggaggaagatggaggatcctactggtgccgggcagccttcccgttaggggagagtgaggaacacattaagctggttgtgctgagtttcatggtgcctctcaagccattccttgccataattgctgaagtcatcctcttagtggccatcatcctgctttgtgaagtgtacacgcagaagaaaaagaatgacccagatgatgggaaagaatttgaacaaatcgaacagttgaaatcagatgatagcaatggaatagaaaacaatgtcccccggtacagaaaaacggactctggggatcagtgaatccaaaaagaactttttgccttgggaagacgtacagcactggagtttgaatttcagcattcattggagaacatccgagttttagatttttccgaagacaaagatgccctcactgtgcccaggagtagtttcgtaaacaatatagaccatctcctacctaaagatgtattttcattgtgtaattgcttttcattaaagcaaggtacattgtttcagctgtgttctgtgagctgtaacctagataataaagtttaccctctctgggagatcagggggacagggcagacaccagcaaaatcagttaataacccacaaagtaaatattgctaaagatctgtttattaccaaagaatttattaaagagaaagtgtttgccaaaaa

SEQ ID NO: 3816 - DNA, 1908 bp, Rattus norvegicus
  Genbank Accession No. NM_053739
atggaggggtctaaggcgtccagcagcaccatgcaggtgagcttcgtgtgccagcgctgtagccagcctctgaaactggacacgagcttcaagatcctggaccgagtgaccattcaggaactcacagctccattacttaccacagcccaggcgaaaccaggagagagccaggaggaagaggctaactcaggagaggagccatttattgaaactcgccaggatggtgtctctcgaagattcatccccccagccaggatgatgtctacagaaagtgctaatagcttcactctgatcggggaggcatctgatggtggcaccatggagaacctcagccggagactcaaggtcactggagacctttttgacatcatgtctggccagacagatgtggatcacccactgtgtgaggaatgcacagatactcttttagaccagctggacactcagctcaatgttactgaaaacgagtgtcagaactacaaacgctgtttggagatgttggagcaaatgaatgagggcgacagtgaacagctacagagggagctgaaggagttggccttggaggaggagaggctgatccaggagctggaagatgtggaaaaaaaccgaaaggtggtggcagaaaacctggagaaggtccaggctgaggcggagagactggaccaggaggaagctcagtaccagcgagaatatagtgaatttaaaaggcagcagctggagctggatgatgagctcaagagtgtagagaaccagatgcgctatgcccagatgcagctggacaagctcaagaaaaccaatgtcttcaatgcgaccttccatatctggcacagcggacaatttggcacgatcaataatttcagactgggtcgcttgcccagtgctcctgtggaatggaatgaaatcaatgctgcctggggccagacagtgttgttgctccatgctttggccaataagatgggtctgaaatttcagaggtaccgacttgttccctatggaaatcactcgtatctggagtccctgacagacaaatctaaggagttgccgttgtactgttctgggggtttgcggtttttctgggacaacaagtttgaccatgcaatggtagcttttctggactgtgtgcagcagttcaaagaagaggtggaaaaaggagagactcgattttgtcttccgtacaggatggacgtggagaaaggcaagattgaagacactggaggcagtggcggctcctattccatcaaaacccagtttaactctgaggagcagtggacaaaggcgctcaagttcatgctgacgaatctcaagtggggtcttgcttgggtgtcctcacagttctataacaagtgacttgctccttaggggatatttgcctttaaggttttacattttgtttggtttggaaagatgctttaaattaaatttgggtaatattaaaccacatgtttacaataccagaatccacaaaagctactttattttacaatatgacagttttcagagcacagcacgccatgtatagcaaagagccctgccgtagtttggctcaaccccatgctgtcctttccctcttccctggaaacaactaatttaaatttgctttgttttcttttttaagttgaattgacattaatgtgttttcactggattttatctctctcaacttcctgtacttaaaatttgaaacagaaaagttttgagatgagatgcttgtggcacacagttgggtaatgtggggaaaggacaagaggtacaggtttaactctgtcctcacttctagtattgaacgcttactgtgctaactattggaattacaaaatgctgtttgatactgtttgagatgtggaaggatttaattatttgtaataaaggatttgctatggtctattaattaccaaaaaaaaaaagctt

SEQ ID NO: 3817 - DNA, 2680 bp, Rattus norvegicus
  Genbank Accession No. NM_053742
gcagctgtgagggcttcccggaagatggtgctgattaaggaattccgtgtagttttgccgtgttctgttcaagagtatcaggttggacagctttactctgttgcagaagcgagtaagaatgaaactggtggtggagaaggaatcgaagtcttgaagaatgaaccttatgaaaatgatggcgagaagggacagtacacacacaaaatctaccacctgaagagcaaagtccctgcgttcgtgaggatgattgctcccgagggctccttggtgttccatgagaaagcctggaatgcttacccctactgcagaacaattgtaacgaatgagtacatgaaagatgacttcttcatcaaaatcgaaacatggcacaaacctgacttgggaacattagaaaatgttcacggtttagatccaaacacgtggaaaaccgttgaaattgtccacatagacattgcagatcgaagtcaggttgaaccagcagactacaaagctgatgaggaccctgcgttattccagtcagtcaagaccaagagaggccccctgggacctaactggaagaaggagctggcaaacacccctgactgtcctaagatgtgtgcctataagctggtgaccatcaagttcaagtggtgggggctgcagagcaaagtagagaacttcatccagaagcaagaaaaacggatatttacaaacttacatcgccagctcttttgttggattgacaagtggattgacctgacaatggaagacattaggagaatggaggacgagactcagaaagaactagaaacaatgcgtaagaagggttccgtccgaggcacgtcggctgctgatgcctagatgagcccctgtaggtcagagacattatcaaactgtctacggagtcaaggccaagtgagggggaccagtgcggcctgcgacgactaaagccaccagcgtctcagtgttgacggatgtttccagtgtgtgcctctgacggctcgggcacacttgtgcacactcgagggcacacacacacccatgcacacacactcacactgtatgtatgtctgtagctgtatgtaaagcacatatggctacaggcctagatacacacgagtgtatatatatatgtacatgtgaagatggatcagtaccttttctccaaagtactgcacctgtcttcagcagaaatactaaagaaaatattttcaatatatatacctggaacagatattaatacccatcaacatgatgccctggatggacaaacggactgccatgtggtgccctgtggtgctggctggcgtgcttcgtgaatgccaggtgtggaccagtgtgtacagcctttggttaggtttctgtttttttcaagtcaccacacacacacacacgtttagtctcaacccatcagcaacaactcctacagaaagattttttcaaatttttagatactccagtgactctggaatgtaaactctggatgtatttataactatttatttctgggtggccactatcttccagccaaatccaacaatatctgtcaagtaaggagtgaaagctctttattggtttgcccgagggttggggatatccttttttttaaaaaattgccactttttattggatttttgtattttgaatttcaagtatttttctatatcaaatctagcaaaaaacggtgatgacggtttgtgatttataataaacactgacaatattcagattctggctaagcaaacagggtgatcaggcaattaacctgagtggcactggaggctgtgcagagccattctgtggagttttgtttctgaaatggcttttctggaattacggcctggagactggatggtctgtattgctctcagttcacagggtaggagagtggtcccgcccggctgtttccagttacagtccaagctaggaggaaatgctgatgggagcaggcacagcttgagcatgacacaggcctgtccccgtcctgaggcccagctagacctgggccttgccgacagctctgcttcctcctcctgtatctcctcctcctcccccttcctcttctgtctctactttctcctttttttttaagagaaaggagcagtagctgggaaggattttcttttttttacctttccgtctgatgctattctcctctcgtcagtcctggaaccctgaccagcatcacactgttgaatccttcaggttacacactgccttttaacctccaccctgcagtcagagcacggtggtgacacccctttgttgacaggcttgaccttcatgtcccttctgccctgccctgtgtcccatgggggaaatggcagagagtcccactgcatcacactgccctgttagcctcagcaacaagccctgggttccatgtcctctaagctctagataaaggtggttattccctgggcactgctggaagctgggaaggtcaccaccagaagggtcattgccagccttgtctcctccagtgaaaccagatcacagacatccatagtttctctgagagctggggcacacaaggaaaccagagcccagtatggattcttgtgttgctctagcagctgtggagattgagggatgtggtgaatgcaaagaacccagtttacttggcagtctcctgtgtaaatcacagtaaaacaaagtgaaatcgaaacaagaataaatttgatctcaaaatgaaaaaaaa

SEQ ID NO: 3818 - DNA, 2131 bp, Rattus norvegicus
  Genbank Accession No. NM_053747
gtgtcgcgctcgcctgagtcaccgccatggccgagagcgcagagagcggcggcccaccgggcgctcaggacagtgcggccgacagcggccccgcagagcccaagatcatgaaggtcacggtgaagacgcctaaagagaaggaagagttcgctgtgcccgagaacagctcggtccagcagttcaaagaggaaatctcaaaacgtttcaaatctcatattgaccaacttgtgttgatatttgctggaaaaattttaaaagatcaagatactttgagtcagcatgggattcatgatggacttacggttcaccttgtcatcaaaacccaaaacaggccgcaagataattcagctcagcaaacaaataccactggaaacagtgtgaccagttcaccagctcctgacagtaaccccacgtctgggcctgctgctaacagctcctttggtttaggtggacttggaggacttgcaggtcttagtagcttgggtttaaataccaccaacttctctgaactacagagccaaatgcagcggcaacttttgtctaaccctgaaatgatggtccagatcatggaaaacccctttgtgcagagcatgctctcaaaccctgacctgatgcggcagctgatcatggccaacccacagatgcagcagctgatacagagaaacccagagatcagtcacatgctcaataacccaaacataatgcgacagacattggaacttgccagaaacccagcgatgatgcaggaaatgatgagaaaccaggaacgagacttgagcaacctagaaagtatccctgggggctacaacgccttacggcgcatgtacacagatattcaggagcccatgctaaacgctgcgcaagagcagtttggtggtaatccatttgcttccttagtgagcagtccgtcctcagcagaagggactcagccttctcgaacagaaaatagggatccgctacctaacccttgggctccacagactccccagagctctccagcctctggcagcactggcagcaccactaacacagtgagcacctctgctggcaatgccaccagtaccccggcgggacagggcacctcagggcccaacttggtgcctggagcaggagctagtatgttcaacacgccagggatgcaaagcttgttgcagcaaataactgagaaccctcagctcatgcagaacatgctgtctgccccctacatgagaagcatgatgcagtcactgagccagaaccccgaccttgccgcacagatgatgctgaataaccccctatttgctgggaaccctcagcttcaagagcaaatgagacaacagctcccaaccttcctccaacaaatgcagaaccccgacacactgtcagccatgtcgaaccctagagccatgcaggcgctgctgcaaatccagcagggcttgcagacgttggccacagaagctcccggcctcatcccagggtttactcctggcttggcagcgggcaattctggaggccctgcaggaaccactgcacctagcactgcacctggtgaggatacgaacccccaagggggcgctgctgagccaggccaccagcagtttatccagcaaatgctgcaggccctcgccggggtgaaccctcagctgcagagtccagaagtcagatttcaacagcaactggaacagctcagtgcaatgggattcttgaaccgtgaagcaaacttacaagcactgatagcaacagggggcgacatcaatgcggccattgaaaggttgctgggttcccagccgtcatagcagcatttctgtatcctgaaaaaatgtaatttatttttgataacggctcttaaatctttaaaataacctgctttatttcattgggattctgtgctgttgtaaaggaaaccaataggaagtctctggaggtggagtgcagtaagatgtgcgggtttctgtgtctttggaacagtgggaatcgatgtctctggttaaggccgctgcatgcgtcaaacacttggcatttgttgtaatcttttaaacatcaccttttctaattgggtgaacacatttttgtcctgcatctgtccaactaacttgctttttaaacatagccctctggtagtaatttatgtagaataaaggcattaaaaagc

SEQ ID NO: 3819 - DNA, 1684 bp, Rattus norvegicus
  Genbank Accession No. NM_053752
gctcctactgggcctgactttgctggtgagctccctgcaagctttggtgtgctttgagtgtggcaacctcaattctatggggatttgtaactttagaacagctgtatgttacgctcatcctggtgaggtttgtgcctcagttttaacctataaagatggaaaatttgtatatggaaaccagagctgtgctgagtgctccgggaggactgttgagcatggaagtctgatagtatcaacaaactgttgctcagccacctctttctgcaatatagtacgtccctgatacttaattgtatggaaggattttagtgctctttactgagtcttgacactggagcatgccagaaagaattatctactgaccgtgtctggagaacgcactaagatttctacatcatgttttctgactacgtgtacatcatatcatatgatcttcagtgatctgtaataaattgaaggccttacaaattttgcggctgccactgcaaccatggtctccggcagcagcggccttgccgccgcccgcctgctgtcgcgcaccttcctcctgcaacagaatggaatacggcacgggtcttacacagcctctcggaaaaatatctatattgataaaaatacgaaggttatttgccagggtttcacaggcaagcagggtacctttcacagccagcaggctttggagtacggcaccaaactcgtgggaggaaccactccagggaaagggggcaagaagcacctgggcttacctgtctttaatactgtgaaggaagccaaagagaaaacaggagcgacagcttctgtcatttatgtccctcctcctttcgctgctgccgccatcaatgaagcaattgacgcagagattcccttggttgtgtgcattactgaaggtattccgcagcaggacatgttgcgggtcaagcacaagctgacacgccaggggaagacgaggctaattgggccaaactgccccggtatcatcaaccctggagaatgcaaaatcggcatcatgcctggccacattcacaagaaaggaagaataggtatcgtgtccaggtccggtactctgacttatgaagcagttcaccaaacaacccaagttggattggggcagtccttgtgtattggcattggaggtgacccttttaatgggactaattttattgattgccttgacgtcttcctgaaggatccagctacagaaggcatcgtactgattggtgaaattggtggtcacgctgaagaaaatgccgcggagtttctgaaggagcataactcaggtccaaaggccaagcctgtagtgtccttcattgctggtataactgctcctcctggcagaaggatgggccacgcaggggcgattattgctggaggaaaaggtggcgccaaagagaagatctctgctcttcagagtgcgggtgtaattgtcagcatgtcccccgcacagctgggaacctgcatgtataaggaatttgaaaagaggaagatgctttgaaggacacgacatgaattttaaggctgtggaggaaatctcacagactggagagcccgtccagactgcagcccaggcacctgaccctggtctctcagtacaggggaagtccaggcatgttttagaatgtcctaaattgagctattttcacttactgtgtaacagagacagataataaatctatcatttgatttg

SEQ ID NO: 3820 - DNA, 1888 bp, Rattus norvegicus
  Genbank Accession No. NM_053753
tgggctcccaggacagaccttagaatcgtggggcaagagcagtgcaggaggatgaaggaggcggaactgaacagagatgtggctaaattctgcactgacaaccagtgtgtcatcctacagccccaaggactggggcctaagtcagctgctcccatggctcccaggacactgaggcacgtccaggccattgtggcactagtggtggtgactgtgttcttctctctccttgctctttttgtggtggttttacagccttggagacagaagcagaatgaggatcatcctgtcaaagccgggcttcatggaggcaactactctggatctgacaattgttcccaatttgtccggagggcagaaatgcaagaggctatccagagtctcagggcctctgggaattctagcagctgtcacaaggagatacagaccctgaagtaccagatggacaatgttagttctcaggtgcagttgcttgggggccatctggaggaagccaatgctgacatccagcaggcaaaggatgtgctgaagggcactggggccttggcctcggagacccaggcactgagaagctccttggaggtcgccagtgcggatatccatagtctgagaggcgatttggaaaaggcaaatgccatgacttcccagacccaaggtctcttaaagagcagcacagacaacaccagtgctgagctccatgtgctgggcagaggcctggaggaagcccagtctgagatccaggctttgaggggaagtctgcagagttcaaatgacctcggctcccggactcagaactttctccagcacagtatggacaacattagtgctgaaatccaggccatgagagatggtatgcaaagagctggcgaggagatgacctcattaaagaaagatctagaaacacttactgctcagattcaaaatgcaaatggccacctggagcagacagatacccagatccaggggctaaaagctcagttgaaaagcaccagttccttgaactcccagattgaggtggtcaatggcaaattgaaagactccagcagagagttacagacactgagaagggacctgagtgatgtctcagctttgaagtccaacgtccagatgttacagagcaatcttcagaaggccaaggcagaggtacagagtttgaaaacaggtctggaggctaccaaaactctcgctgccaagattcagggacaacagagtgacctggaggccctgcagaaagctgtggctgcacacacgcaggggcagaagactcagaatcaggttctccagctgatcatgcaggactggaagtacttcaatggaaagttttattacttttctcgtgacaagaagtcatggcatgaggccgagaatttctgtgtgtcccagggagcacacctggcttcggtgacctctcaggaggagcaggcattcctggtacagatcacaaatgctgtggaccattggattgggctcactgatcagggcacagagggcaactggcgctgggtggatgggacaccattcgattatgtccagagcagaaggttttggaggaaaggccagcctgacaactggagacacggaaacggagagcgtgaagactgtgttcatctgcagcggatgtggaacgacatggcctgtgggaccgcctacaactgggtgtgcaagaagtctacagattggtctgtggccagaacggaccagagctgagtctctcccccctgagactcctatagccttgaactctcctcaggacttcttgtgtcctgtgttgccattgtctcgccatttaaaacatgcttgcctccttaaagataagccctgcatgctagtgtccccttagtgccccaacaggtctgcctagataagccctcaataaacactcattgaatgg

SEQ ID NO: 3821 - DNA, 723 bp, Rattus norvegicus
  Genbank Accession No. NM_053756
cggagcctgggtgggaagaacaggcccctggagggcacttgaccttaagcctcttttcctccgcagagaggaagcgggagaggagcccacgtcgcctgtcacccaatatctccagccgcgcagtcccgaagagtgtaagatgttcgcctgcgccaagctcgcctgcaccccctctctgatccgagctggatccagagttgcatacagaccaatttctgcatcagtgttatctcgaccagaggctagtaggactggagagggctctacggtatttaatggggcccagaatggtgtgtctcagctaatccaaagggagtttcagaccagtgcaatcagcagagacattgatactgctgccaaatttattggtgcaggtgctgcaacagtaggagtggctggttctggtgctggtattggaacagtctttggcagccttatcattggttatgccagaaacccttcgctgaagcagcagctgttctcatatgctatcctgggatttgccttgtctgaagctatgggtctcttttgtttgatggttgctttcttgattttgtttgccatgtaacagaaattactgcctaaaatgttggcattcatagtaattacggatgtaattctgtgtatcttgctgtgactccgaagactgtagtactggtgtcatggaaatatgtgttatttccaaagtcatttcattaaagatggaaactttaaaaaaaaaaa

SEQ ID NO: 3822 - DNA, 2854 bp, Rattus norvegicus
  Genbank Accession No. NM_053764
gcacttctgtgtgctgacacatccttggagccttcagactgagccagactccaggctcctcgctgggcacaaggaggctcctgctagacacttcctgtggcagagaaaagaggtagtgagctggtgtttcaggatgtaagggcccggaggagcagagcgagctctctccactgcttgcccgccaccctgagagtgctggtcggtgtttccacaatccttgtggtgggtggccccccgtggaggggacctgtgagcaacggaggcatgccagggaagcccaagcacttgggtgtccccaacgggcgcatggtcctggctgtctctgatggagaactgaccagcacatcaggttcccaggcccagggtgagggcagaggcagctccctcagcatccacagcctccccagtggccccagcagccccttctccactgatgagcagcctgtggccagctgggcccagtcctttgagcggctgctgcaagacccacggggtctggcttacttcactgagttcctgaagaaggaattcagcgccgagaatgtaactttctggcaagcctgcgagcgtttccaacagatcccagccagcgacaccaaacagctagctcaggaggcccacaacatctaccatgagttcctgtccagccaggcactgagcccagtgaacatcgaccgacaggcctggcttagtgaggaggtgctggcccagcccaggcccgatatgttccgagcacagcagcttcagatcttcaatttgatgaagttcgacagctacgcgcgcttcgtcaaatccccgctgtaccaagagtgcctgctggccgaggccgagggacgccccctgcgggaacctggatcctcacacctcgggagcccggacactgcgaggaagaagccaaagctgaagcctggaaagtcactgccgctcggtgtggaagagttggggcagctgccgcttgctgagggccgccctctccgcaagtcctttcgtagagagatgccgggtggagctgtgaattcggccctgcgacgagagtctcagggatccctgaattcttccgcgagtctggacctgggcttccttgcctttgtgagcagcaaatccgagagccaccgaaagagccttggaagtggagagggtgagagcgaaagccggcccgggaagtactgctgcgtgtatctacctgatggcacggcctccttggccctggctcgacctggcctcaccatccgtgacatgctggcaggcatctgtgagaagagaggcctctctctacctgacattaaggtctacctggtgggcaaagaacagaaggccctggtcctggatcaggactgcaccgtgctggcagaccaggaagtgcgactggaaaacaggatcaccttccagctggagttggtcggcctggagcgtgtggtacggatctctgctaagcccaccaagcgtctgcaggaggcgctgcagcctatcttggccaagcacggcctgagcctggatcaggtggtcctacacaggccaggagagaagcagctagtggatttggagaatctagtgagctcagtggcttcacagacactggttttggacactcttccagatgcaaagacaagggaagccagcagcatacctccctgccgcagccagggatgcctccctagaacccagaccaaggacagtcaccttcctccactgtcctccagtttgtcggtagaagatgccagtggttctactgggaaacgacagacctgcgacattgaaggcctagtggagctgctgaatcgtgtgcagagcagcggggcccatgaccagaggggacttcttcgcaaagaggacctggtccttccagaatttctgcagcttccttcccaaagaccaggttctcaggaggctccaccatagactgaatcaactattcagcccagggagggcccttcagactccaccatccactcggtcctctgacacctgtgtaacaatccaggctgtctgcatggtgcctgggcaaaccaagcatgccacgggtctgtgctgcatgccctgtctgtaccaggagtgtctttggtccctttctgctgtgggcaggcccacagaaagggccaggaaggggtggctacttgttctctcataggtttacctaccaattcctcacagtaggccatcaaggggaggtgggccttgtcccttggcataagcatactgaacatgaagaggtgactttggcagtgtcagcctccttgacttgttctaggctttagcagggggcaggaaggaggggctggcccctccttaaagagttggtgtaagaaagacctgggtgtactactgggcaacccctccctccatccacagattttgctgtacatatggattttatggttggcttggggcagctgggtttgtcctggatgtatgatactgttataataataattattattattcagccacgaggtgtcttttttttgtctttttttttcggagctgggaaccgaacccagggccttgcgcttgttaggcaagcgctctaccactgagctaaatccccaaccccatgaggtgtctttcttgtatgccactctgccctgtgtagtctcactaccccactgcctctgtgccaggccaggaagttttggggaaccttagtgtatacctcctcacttcttgttttcagaatctctctccccaaggcataggatatagaaggcaggggggggggagcagaatggagagggagagagcgccaccccccaccccctactgttcttggccatcacccagctgctccacaatgtccatgggagatgaatgtatcctttttgtttctgttctgtttctgttggtgatacaatgtatc

SEQ ID NO: 3823 - DNA, 2508 bp, Rattus norvegicus
  Genbank Accession No. NM_053765
ctgaggaactctattttaaaaaactctcaagtaaaaaaaagcaagtcatggagaagaacgggaataaccggaagcttcgggtttgcgttgccacctgcaaccgagccgattactccaaactggcccccatcatgttcggcattaagacggagcctgcgttcttcgagctcgacgtggtggtgctgggctctcacctgatcgacgactacggaaacacataccgcatgattgagcaggacgactttgacatcaacaccaggctacacacgattgttagaggggaagacgaagcagccatggtagagtcagtgggcctagcgctagtgaagctaccggatgtcctcaaccgcctgaagcctgacatcatgattgttcacggagaccgatttgacgccctcgctctggctacatctgctgccctgatgaacatccgcatccttcacattgaaggaggagaggtcagcgggactattgatgactctatcagacacgccataacaaaactggctcactaccacgtgtgctgcaccaggagtgcagagcaacacctgatctccatgtgtgaggaccacgaccgcatccttttggctggctgcccttcctatgacaaactgctctcagccaagaataaagactatatgagcatcattcggatgtggctaggtgatgatgtaaaatgtaaagattacattgttgccctgcaacacccggtgaccaccgacattaagcattccataaagatgttcgaactgacactggatgctcttatctcatttaacaagaggaccctagttctgtttccaaatatcgatgcaggcagcaaggagatggttcgagtgatgcggaagaagggcatcgagcatcaccccaatttccgcgcagtcaagcacgtcccgtttgaccagttcattcagctggtcgcccacgctggctgcatgattgggaatagcagctgtggagtgcgtgaggttggcgcctttggaacccctgtgatcaacctgggcacgcggcagataggaagagaaacgggggagaatgttcttcatgtccgggatgctgacacccaagacaaaatattacaagcactacacctccagttcggtaaacagtacccttgctcaaagatatatggggatggaaatgctgttccaaggattttaaagtttctcaaatccatcgaccttcaagagccactacagaagaaattctgcttccctcccgtgaaggagaacatctctcaggatattgaccatatcctcgaaactctgagtgccttggctgttgatctcggggggacgaatctgagagtggcgatagttagcatgaagggtgaaatagttaagaagtacacccagttcaatcctaaaacctatgaggaaaggattagtctaatcctgcagatgtgtgtggaagcggcagcagaagccgtgaagctcaattgcagaattctgggagtaggcatctccacaggtggccgtgtgaatccccaggaaggagttgtgctgcactcgaccaagctgatacaggagtggaactctgtggacctcaggacaccactctccgacaccctgcatctccccgtgtgggtggacaacgacggcaactgcgctgccatggcggagaggaagtttggccaaggaaaaggacaggagaactttgtgacgctcatcacagggacagggatcggtgggggaatcatccaccagcacgagctgatccacggcagctccttctgtgcggcagagcttggccacctcgtggtgtctctggatggtcctgactgctcctgtggaagccatgggtgcattgaagcctacgcctctggaatggccttgcagagggaagcaaagaagctccacgacgaggacctgctcttggtggaagggatgtcagtgccaaaagacgaagctgtgggcgccctccatctcatccaagccgccaagctgggcaacgtgaaggcccagagcatcttacggacagctggaactgctttgggactcggagttgtgaatatcctccacactatgaatccttccctggtgatcctgtctggagtcctggctagtcactacatccacattgtgagggacgtcatccgccagcaagccctgtcctccgtgcaggatgtggatgtagtggtttcagacttggttgacccggccctgcttggtgcggccagcatggttctggactacacgacccgcaggatccactaggcctcctgggaatagacctggactgagacccaagagctactgagtggaaccacgctctcttagatcagtatttcttcaaaggccagtgtgggaggctgcggagccagctcagtggtcaagagcctaaactgctcttgccaaagacccaagttcagttcccagcacccatgtcaggcactcaactgcctgaaagccaagctccaggggatccagtgcctcagctgcctcaggcagctgcactcaaatgtacatagtcctctccagaatacacgtaaattaaaataaatcttgg

SEQ ID NO: 3824 - DNA, 1361 bp, Rattus norvegicus
  Genbank Accession No. NM_053768
ccattcttgaaaccgaatctgaagttaaaggctgagggaaaatggcccattaccatgacgactatggaaagaatgatgaagtggagtttgtccgaactggctatgggaaggacatggtcaaagttctccatattcagagggatggaaaataccacagcatcaaagaggtggcgacttcggtgcagttgactctgaggtccaaaaaggattacctccatggtgataattccgacatcatccccacagacaccatcaagaacacagtgcatgtcctggcgaagttcaaagggatcaaaagcatcgagaccttcgctatgaacatctgcgagcacttcctctcttcctttagccatgtcacccgagcccatgtccacgtggaagaggtcccctggaagcgttttgaaaagaatggagtcaaacacgtccatgccttcatccacaccccgacgggaactcacttctgtgacgtggagcaggtgaggaacggacctcccatcattcactctggaatcaaagacctcaaggtcttgaaaacaacccagtctggatttgaaggattcatcaaggaccagttcactactctccccgaggtgaaggaccgatgctttgccactcaagtgtactgcaagtggcgctaccagaatcgggacgtggatttcgaggctacctggggcgctgtccgggacattgtcctgaagaaatttgctgggccctatgacagaggtgaatactcaccttccgtgcagaagaccctctatgacatacaagtgctgaccctgagccagcttcctgagatagaagacatggaaatcagccttccaaacattcactactttaacatcgacatgtccaaaatggggctgatcaacaaggaagaggttttgctgcctctggacaacccctacggcaaaataaccgggacggtgaggaggaagctgccttccaggctgtgacgttatggctccagccagttgtgatgcttgggataactgtgtgctcacctgcaaaaatttcaactcaggatactgattgctctgctctgtgtgaagtaattgctcttccgtttctagtttagcaaggggcttgtagctgtgcgcacgtggagccctgcattagcagacaccgcaggctccgtggccttgggcagattcctttaaaactgtgatcggagaatcacagcgatatttctccttgctgttcttgtgccctctgcctcagactctgtctttaggatccgatcgttaaggaaatagtcgtaaagcactggctgctgccacatccgttgatctgaacatgagatcaaacactgtcatactcctagggatgtctgggttgtaccaaaaacgtaataaaaccatgtc

SEQ ID NO: 3825 - DNA, 1908 bp, Rattus norvegicus
  Genbank Accession No. NM_053769
gcgcggtgaagccagattaggatcagcgagcacttgaggatttagggccacaaaaaaccgcacaagatcgacagactatttctggagagctgcagaacgggcacgctggggtcgctggtgctggccatggtgatggaggtgggcatcctggacgccggggggctgcgcgcgctgctgcgagagcgcgccgctcagtgcctgcttctggattgtcgctccttcttcgccttcaacgccggccacatcgtgggctcagtgaacgtgcgcttcagcaccatcgtgcggcgccgcgccaagggcgccatgggcctggagcatatcgtgccgaacaccgaactgcgcggccgcctgctggccggagcctatacgcccgtagtgctgctggacgaacgcagcgccgccctggacggccgcaagcgcgacggcaccctggccctggccgcgggcgcgctctgccgagaagcgcgctccactcaagtcttcttcctccaaggaggatatgaagcgttttcggcttcctgccctgagctgtgcagcaaacagtccacccccatggggctcagcctcccgctgagtactagtgtgcctgacagtgcagaatccggatgcagctcctgtagcacccctctctacgaccaggggggcccagtggagatcctgtccttcctgtacctgggcagtgcttaccatgcttcccggaaagatatgctcgacgccttgggtatcactgctttgatcaacgtctcggccaattgtcctaaccactttgagggtcactaccagtacaagagcatccctgtggaggacaaccacaaggcagacattagctcctggttcaacgaggcgattgactttatagactccatcaaggatgctggaggaagggtgtttgtgcactgccaggccggcatctccaggtcagccaccatctgccttgcttacctcatgaggactaaccgagtgaagctggacgaggcctttgagttcgtgaagcagaggcggagtattatctcccccaacttcagcttcatgggccagctgctgcaatttgagtcccaagtactggcccctcactgttctgcagaagctgggagcccggccatggctgtccttgaccggggcacctctactacaacggtcttcaacttccctgtctccatccctgttcaccccacgaacagtgccctgaactaccttcaaagccccatcacaacctctccgagctgctgaagggccaggggaggtgtggagtttcacgtgccaccgggacgacactcctcccatgggaggagcaatgcaataactctgggagaggctcatgtgagctggtccttatttatttaacacccccccccccaaacacctcccgagttccactgagttcccaagcagtcataacaatgacttgaccgcaagacatttgctgaactcagcccgttcgggaccaatatattgtgggtacatcgagcccctctgacaaaacagggcagaagggaaaggactctgtttgagccagtttcttcccttgcctgttttttctagaaacttcgtgcttgacatacctaccagtattaaccattcccgatgacatacacgtttgagagttttaccttatttatttttgtgtgggtgggtggtctgccctcacaaatgtcattgtctactcatagaagaacgaaatacctcactttttgtgtttgcgtactgtactatcttgtaaatagacccagagcaggctttcagcactgatggacgaagccagtgttggtttgtttgtagcttttagctatcaacagttgtagtttgtttatttatgatctgaagtaatatatttcttcttctgtgaagacattttgttactgggatgactttttttatacaacagaataaattatgacgtttctattg

SEQ ID NO: 3826 - DNA, 6331 bp, Rattus norvegicus
  Genbank Accession No. NM_053770
  misc_feature (1)..(6331): n = a or c or g or t
gaattcggcacgaggaaaaatctttggagagaagagagccacagtgagcacgctagtgcacaattattgcagccacgtgtgcccgcaagctggccctgcgacaagctgttgagtgctgttgcaattagctgattggagaacggggactgcagggtgataatgctgcgtctccgctcgcgggcaccaggaaagggttttgtctcgggaaggcaagtcttccctgcacagttatctcagcagctccctagctgaagagaactgggggctctaaagggagggggtcgcactgtgcgagcacagattctgtgccaggctgttgcttatgaaccgcacgtctgggaaagcaggtgtgtgctcggacgggcactgggctggaacgcaggcggcggctctcgggttcacctgcttcctgttaacagactgttggctcacagagcatctgctcttacacgctgaaactgcggctgagaaagggttcccggcatcccacttgactgacggaggcacttggattggacttaatcttaaacctctggaggtcaagaccttttaaaaagggctaaataaacaatctacatgttaaaggccagcgactcctacttcctctgttggagcaactgtgaagtccagcctcttctaggaaaactgaagactttaataacacaccgttcaaggtgaaaatgaatacagatagcggtgggtgtgctcgcaaacgtgccgccatgtctgtcacgttaacatctgtgaagagagttcaaagttctccaaacctattggctgcagggcgtgagtctcactctccggactcagcttggagatcttacaatggtcgaaatccagagacactgaacggagatgccacatattcctctcttgcagcaaaaggttttagaagcgttcgaccaaacctgcaagacaaaaagtcaccaacccagagccatatcactatcaacggcaactctggtggcgccgtgagtccagtgagttactatcagaggccattctccccttctgcatactccctcccagcctcactcaactccagcattatcatgccacacggcaggtcgcttgattctgcggagacatattcccagcatgcccagtcgctagacggcaccatgggaagctccatcccactctacagatcctccgaggaagagaagagggtcacagtcatcaaagccccgcattacccagggatcggccctgtggatgagtctggaatccccacagccattagaacgacagttgaccggccgaaggactggtacaagacaatgtttaaacaaattcacatggtacacaagccggatgaggacacagacatgtataatactccttacacatacaatgcaggtctgtacaactcgccctacagtgctcagtcacatcctgctgcaaagacccagacctacagacctctttccaaaagccactcggacaatggcaccgatgcttttaaggaggcaccctcaccagtgcctcccccacacgttccaccacgaccaagagatcagtcttcaacagaaaagcatgactgggatcccccagacagaaaggtggacaccaggaaatttcgatcggagccaaggagtatttttgaatacgagcctgggaagtcatccatcctgcagcacgaaagacccgtctccgtctaccagtcttccatagacagaagcttggaaagacccagcagctctgcaagcatggcgggtgactttagaaaacggaggaagagtgaacctgcagtgggcccgcccaggggcttgggggatcacagttcaagcaggaccagccccggccgggcagacctcccaggatcaagttccacctttaccacgtctttcattagttcttctccttcctctccctcgagagcacaaggtggggatgatagcaaaatgtgtccgcccctttgcagttactcggggctcaatggctcgccctctagtgagttagagtgctgcggcgcttatagaaggcacttggacgtcccccaggactctcaaagggccatcactttcaagaacggctggcaaatggcccggcaaaatgcagagatctggagtagcactgaagaggcggtttcccccaaaatcaaatcacgaagctgtgacgatctcctgaatgatgactgcggcagcttcccagaccctaaaaccaagtcagaaagcatgggttctctgttatgtgacgaaggctccaaagagagcgaccccatgacgtggacttccccctacatcccggaagtgtgcgggaacagcagatctaggctcaaacataggtcagcccataacgccccaggcttcctcaaaatgtacaagaaaatgcaccgcatcaaccgcaaggatttgatgaactcggaggtcatttgctctgtgaaatccaggatccttcagtacgagaaggaacagcagcacagggggctgctccatggatggagccagtcgtccaccgaggaggtgcccagggacgtggtacccactcgcatctcggagtttgagaagctgattcagaagtcaaagtctatgcccaatctaggagatgaaatgttatctcctgtaaccctagaacccccacaaaatggtttgtgccccaagaggcgattttctattgagtctctgctggaggaggaaactcaggtccgacacccttctcagggtcagcgaagctgcaagtcgaacaccctggtacccatccacatcgaggtcaccagcgatgagcaacctagaacacatatggagttttccgacagtgaccaagatggggttgtgtctgaccacagcgataacgtccacgtcgaaaggtcgtccttttgtagtgaaagtgacttcgaccacttttcattcacatcctctgaaagtttctacggatccagccatcaccaccaccatcaccaccaccatcacggacacttcatcagttcctgcaaaggccgatgccccgcttcttacactcgatttaccacgatgttaaaacacgaaagagctaagcatgaaaatattgaccgacccagaaggcaagacatggatcctggcctatctaaactcgcgtttctagtcagccctgtgcctttccgaaggaaaaaagttttgactccccaaaaacaaactgagcaggcaaaatgcaaagcctcggtagttgaggctctggactctgcccttaaagacatttgcgaccaaataaaagctgaaaagcggagaggaagcttgccggacaacagcatcctgcacaggcttattagtgaactgctgccacagattcctaagaggaattcatctcttaatgctctaaaaaggagccccatgcaccagcctttccacccactgcctcaagatggtgctattcattgtcccctgtaccaaaatgattgtgggagaatgcctcacagtgcctctttcccagacgtggacacgaccagcagctaccacgcacaggactatggtagtgtgctgagtctccaagatcacgagtcccctagaagttactcgtctactctgactgacttgggaagaagtgtatcacgggaacgaagaggaactccagaaaaagaggtaaaattgcctgcaaaagctgtctatgatttcaaagctcagacttctaaggagctgtcatttaagaaaggagacaccgtctacatcctcaggaaaattgaccagaactggtatgagggggagcaccacggaagagtgggcattttcccaatctcatacgtagagaaactaacacccccagaaaaagcgcagcccgcgagaccaccacccccagtccagccgggagagattggagaagccatagccaagtacaacttcaatgcagacacaaatgtggaactctccctgagaaagggtgacaggattattcttctcaaaagagttgatcaaaactggtatgaaggtaaaatcccaggaaccaacagacaaggcatcttccctgtctcctacgtagaagttgtcaagaggaacacgaaaggttctgaggattaccccgaccctcctctaccccacagctactccagtgatagaatttacagcctaagctccaataagccacagcgtcctgtgttctctcacgaaaacattcaaggtggaggagaaccgtttcaggctctgtataactatactcctaggaatgaagatgagctggaactcagagaaagtgatgtcgtagatgtcatggaaaagtgtgatgacggatggttcgtgggaacttcaagaagaaccaaattctttggtacttttcctggaaactatgtcaaaaggctgtgactcacctcactcctaatttatgccacatttcagccacacatctgcattaacccacctgaaacgtcccaggaggcctgttgctgcctcgccttatggtttcccaatagcccattaccatctccatctgctgccaccaaatcaccagcagagggactgccgctgtgagccttagggaggctgggagccttagagaaaagtggcaaaacttacacccacataaatattcagtctcctgctttctgccctgaactttgaaatgcctgtatatggaatcagaatgaaaatgatcatactttcaaaaaagtgaaataattaaggaagaaagaaagagaaaagaaatagagagactcttcaggaggctgtctggcctcatggctgaatctccacctctctggaaggtgtactgtcctcaggaagcctgaagattgttttttttctgaaatgctatggttccagttctcactctcatctaggcggtatattttcctttcacgagtttgcctagcgctcgggtttacactacatgacaactatacttcggctgttgtttgcttgcacttattattccttgtttcatgcacagtgatcacaaaatccagagtgcctagggaaggttcactggttccactggttcgagtgtgatttttgttgactgcattatattttcacacggggaggggggtctttcccctgcccacttttttgtgcttattagaagtgcaaacagtgagcaactgagagctcagccacaccacaggacaaatccgtgttgtgaattcgcattgctgttttgtgtattaaggtgtaatcatcagcttcatggacaacaagctattagtgatttctttacctgttaaaacttacaggcagtgctagtgagttaggcagaaagntgacagtaataccagtaggtgagcttcactgcgtgcatgctcacacgtttgagnttgtatgaggacatataattcatatgctatgttgtacattttatggaaatataagagaatcccacattattttatagagtacttcaggagcatcctaagtgttaaggctggctttagcaaggattatgatcaatacaactatttttactacaataattatttttcttctatgagacccagaatcctgactccacttgcagacaggaatatatatgttgagcctgacttttttttctggtatatgtaaaatacttcccaggaatacattgggcacttttgggaataatggttaaatcattcaggttgtgcttcctgcccccaaaacagatctacaaaatgataccaaacctgaaagatttaacggatttacggtgcctgcattccacacaacctcacacttagctttgtatttcaaatgaatttgcataaaanctgttcactttancaccttatagtcaaaactttttatggctttcctcccatgggcaatgcttgatcttcccaacatataaactctggcatattttgttcatatgtttgttcctttttggttgtacagactatttacttgttcagaaaacatcgagatctcccaatttgttctttaccccgcccttaaaaggaatttaaactctttcagaagatcgcccttcaccacatctccacagatcacaagctaaggtgaatctggaatatancgtctgcacaaaattttgtgactcagaaaganctttgtaactacnctgaaatacatataataacaatgttccagttacagaggaatattgttggggcaggaagtgaagaaacancttcaagaaacccactttacnctccagttcacaactagctttatattagaaaaacttgggattggaaagtcagccagccagccggccacctgcagcnttgttgataaatgaatactttttcacaccatttatgaaaacaaancttcaactctgttgcctgttatatttaagaaaaattgctgtttctactcnctgtatctgattttaaaaggaaaaaaatattcacgcctggctttcaggacattgactttgaatncttacgagcaaaggncgttgtgtttttcttgcncgtgccgaattc

SEQ ID NO: 3827 - DNA, 1860 bp, Rattus norvegicus
  Genbank Accession No. NM_053783
gcacgagctcgggcggcgcgggtaccctgtctagggtgtcctttgctcaggaatgggcccgcagctgcagtcggcaggatgattctgctggtggtcctgatgctgtctgcggagatcgggagtggagctttgatgagcaccgaggatcctaagccgccctcggtgcctgcgccaacaaatgttctaattacgtcctatgacttgaaccctgtcgtacattggaagcaccagaacgtgtcgcaggctgccgtcttcactgtacaggtaaagatgtatccagaatactggactgatgcctgcaccaacattgcccatcattattgtaatatctacaaacacatttcctatcctgactcatctgcctgggccagagttaaggccaaggttggacaaagagaatctgcctatgcgcagtcagaagagtttattatgtgccgaaaggggaaggttggaccgcctggcctggacatcggaaggaaggaagatcagctgattgtccacatatttcaccctaaggtcaatgtgagtcaggaaaccatgtttggtgacggaaatacctgttacacattcgactacactgtgtttgtgaaacattacaggagtggggagatcctacatacagaacatagcgtcctaaaagaagattgtagcgaaactctgtgtgagttaaacatctcagtgtccacgctgaattccaattactgtgtttcagtagttggaaagtcgtctttctggcaagttaatacagaaacatcaaaagacgcctgtatcccctttctccatgatgacagagaagaatcaatttggatgctgcttgttgctcctcttctcttccttacaatagttgtcccggcacttgtgtgttgttacattaagaagaatccatttaagagaaaaagcataatgttacctaagtccttgctctctgtggtaaaaaatgccacgtccgagaccaaacctgaatcaaagtactcccttgtcacgtcgtgccagccagctgtcctagagaacgagacagtgatctgtgaggagcacttgtccacagtgacaactccagacagcctagaagcaccagagcaggaagaactttctaaaggaaccgtggctacggttgctgaaggaaacacttcccccgagaccaccgacagccctctaactccggtacaaagtggccatttttccctgtcaagtagtaaccagtcaggctcctgtagcctcaccacctatcactccagggacggctctgacagtggcctcgtgggcacaggcagctccatatctgactctgactttctcccaaacaacgactcggaaacaaagatggcagacccagcccctacacctgtgaggaaggccctgactttctccggttatgacaaaccacacgtgttggtggacgtgcccgtggatggggagggcaaggagtctttgattgggtatagactcacgggtgatacccaggaactgtcctaaggccgccgagtcctgacggtgctgaaggatctgcctctaggcagttttcctgctttgttctcgtgaaagactttgcacgttagccgattctgaccgcagcgtccctaatgtgacacccggataaggagtctgtgtgagcgcactgcccggtctactccgcaaatgccaagactgccagagggatgaacagtcacctatgagctcctgcctgggtgggctggttctcctcctctagccttgcttcctccagccgctgctcctccacctcactgcctcacgggacacgggggacctgtcctcacacacctttgtatctgtaagtccgtgtatatagtgtgtttgcagtttcactttaagggaaagctgaaagccactgcaggtgactcc

SEQ ID NO: 3828 - DNA, 2143 bp, Rattus norvegicus
  Genbank Accession No. NM_053799
ggagtctgggggcttaaaacaaggactgggagggccagcctgcgggagggagacgttttttagcctgtcctacggaagcctgcgagggagggtggtatccactcccccaatccagtgtcctgatgcccagcgccaacgccagccgtaagggtcaggagaagccgcgggagatcgtggacgcggcggaagattatgctaaagagagatatggggtatcctctatgatacaatcacaagaaaaaccagatagagtgttggttcgagttaaggatctgacagtacaaaaagctgatgaggttgtttgggtccgtgcaagagttcatacaagcagagcaaaagggaagcagtgcttcttagtcctgaggcagcagcagtttaatgtccaggctcttgtggcggtgggagaccatgcaagcaagcagatggtgaaatttgctgccaacatcaacaaagaaagtattattgacgtagaaggcattgtgagaaaagtaaatcagaaaattggaagctgtacacagcaggatgttgagttgcacgtccagaagatttatgtgattagcttggctgagcctcgcctgcccttgcagctggatgatgccattcggcctgaggtggaaggagaagaggacgggagagctaccgttaaccaagatacaagattagacaacagaatcattgaccttaggacatcaaccagccaggccatcttccatctccagtccggcatttgccatctcttccgagaaacgttaattaacaaaggttttgtggaaatccagactcctaaaataatttcagctgccagcgaaggaggagccaatgtttttactgtgtcttattttaaaagtaatgcctacctcgctcagtctccacagctatataagcagatgtgcatttgtgctgattttgagaaggttttctgcattgggccagttttcagagctgaagactccaatacccatagacatctgactgaatttgttggtttggatattgaaatggcctttaattatcattaccatgaagttgtagaagagatcgctgacactttggtgcaaatattcaaaggacttcaagaaaggtttcagactgaaatccaaactgtaaacaaacagttcccatgtgagccgttcaaatttttggagccaactttaagactggagtattgtgaggctttggctatgcttagagaagccggagttgaaatggacgatgaggaagatctgagtacaccaaatgaaaaactgttgggtcgtttggtgaaggaaaagtatgatacagacttttatgttcttgataaatatccattggctgtaagacctttctataccatgcctgacccaagaaatcctaagcagtccaactcttacgatatgttcatgagaggagaagaaatattgtctggagcacaaagaatacatgatcctcagttgcttacagagagagctttacaccatggaattgatttggagaaaataaaagcttacattgattccttccgctttggagcccctcctcacgctggtggcggcattgggttggaaagagtgacgatgctgtttttaggattgcataatgtacgtcagacctcaatgttccctcgtgacccgaagcgactcacgccttaaagccacactttttattctctctttgattagcttatacctgaggtacttaagatatgcagtagaattaatgcattactaaagtgccacaattattttttaagtagctcaatacgaattcatttaagtcaaaacgttttagaacttcagatatgcttaaataggaaatacttgaacattttaatgagaaatttctatggttgaaattcatagtctatcactataggaaatgttaaggacaatttaaacagtttaggattatataatttttttttcttttctatattgtggtgaccaccatactaatatcctaaattttcaatatttgaacttttaactcttgacattgagaaaaaaaaattggagaaattaccaagattttaacatatataaaactggtatgtcttaaaagttactttcagaaatcatgtaaagtatctgaaaacactggctagaagcagtaacactgaaaccttgttatcaattctgaggctgaaattcaataaaaacttaaagct

SEQ ID NO: 3829 - DNA, 330 bp, Rattus norvegicus
  Genbank Accession No. NM_053800
atggtgaagctgatcgagagcaaggaagcttttcaggaggccctggccgctgcgggagacaagcttgtggtagtggacttctctgccacgtggtgtggaccttgcaaaatgatcaagcccttctttcattccctctgtgacaagtattccaatgtggtgttccttgaagtagacgtggatgactgccaggatgttgctgcagactgtgaagtcaaatgcatgccgaccttccagttctataaaaagggtcaaaaggttggggagttctctggtgctaacaaggaaaagctcgaagccactattacggagtttgcctaatcatgctctgaa

SEQ ID NO: 3830 - DNA, 2243 bp, Rattus norvegicus
  Genbank Accession No. NM_053806
atgcggcggggcgcgctcctggctagcgccctggtcgcctacgccgggtacctggcgctcggcgcgctgcttgtggcgcggctggagcggccgcacgaagcccggctgcgggcagagctggggacgctgcgggagcagctgctgcggcacagcccgtgcgtggcggctcacgccctggacgccttcgtggagcgggtgctggcggcaggacggctggggcgcgcagtgctggccaacgcatcgggacccgccaacgcttcggaccccgcgtgggactttgcctcggcgctcttcttcgccagcacgctagtcaccaccatgggctatggctacacgaccccactgacggatgcaggcaaagccttctccatcgtttttgcactcctgggcgtgcctatcaccatgctacttctgactgcctcagcccagcgcctgtcactgctgctcacccacgcacccctgtcctggctgagcctgcgctggggctggcacccgcagcgggcagcccgctggcacctggtggccctactgatggtcatagtggctatatttttcctgatcccggctgcggtcttcgcctaccttgaggaggcctggagctttctggatgctttctatttctgcttcatctctctgtccaccattggcctgggggactatgtgcctggggaagccccgggccagccttaccgatccctctacaaggtgcttgtcacagcatacctcttcctcggccttgttgccatggtgctggtgttgcagactttccgccgtgtttctgacctccatggcctcactgaactcatcttgctgccggatcccgaccctgccaggctccaccaggatgaggatgaccaggtggacattctggatgcccggacagatctgcatcagcatctctctgctgcctcccacgctaattacgcctccatccccaggtagctgtcgacctggacacacctggcctgggctttgggccccatgtgattagatcaactagaaagcccactcacactctccactgggaggtgaggagtagccgctttgctcctgtgtcctccgctcctcagggccctgacacagtcattttctcctcctatcttttctcccatttcttctcagactctgaccgtttgggctttctgactttgtgagagtggtggtttctatgcctttttgtttygttttgttcttgttcttctgtatctcactctcttgcatagtacatctggcacatccagttcttctgggctccaaccctgggctccatttcagccagtgaggtaaactgaccgactggtcccttgacagtgacaagctccagtgggcaccagaagaggcaagagtagccaggactgaggagtgaacctgatatgttcagggttatctttcctggggacaggaactaacccaagacctgctagtcaagagaaaaaatagtcccttctcctcaggtgtctatgggccatagtacctgtgggaagaggcctgcaatgggccagcatctccctcagtgacttaacaggcaaggaactgacccaggatatgagccgagatccaagtggcatgagacaagcagcttagcgtagttcctgtggtgataccatgtcttttactgggcattgatagccgtgggctctggagccagtcttcctgggcgtgccctgtgactgggccatgtttcaccaatgcatttggacggtcactctacctttcagactctgtctcctaaatggtgaccataataacgcttactctaaaaggcgaactcaaccagtagcacatgcctgtaacctgagctgaagcaggaggcttgagagttcaaaggcaggagccaggcaataaaacaatgtaagcaataaaataataataatgatgahgawrawggtggtggtgatgatgatgatgatatgttcaatggaatatagtgccaggcttaaagggacatgagagtaggctatagaaggatgtataaccctcagggctgggacttattttatttatacaatatatcacttaaagattttggcaggggaaaaaaaaaagattttggcgggctggagagatggctcagcggttaagagcacccgaacgctcttccagaggtcctgagttcaattcccagcaaccacatggtggctcacaaccatctgtaaagagatctgatgccctcttctggtgtatctgaagacagctacagtgtacttatatataataaataaataaatcttcaaaaaaaaaaa

SEQ ID NO: 3831 - DNA, 1923 bp, Rattus norvegicus
  Genbank Accession No. NM_053812
ccgggagctgctagctcctctatggtcacaaagtctcgaggcttctcgggctaaaaggcgactcaaggcggcatccagcaccatgaattcactgatagcagttcctgccagtcaggcctgaaaccttggccccgggagcagccaggagcccttccggatctttgtcttcaaactgctgggccattccacatctggagcagtcaggcaggtgacaagtgagggtaccctccaccaagaccggaaaaatggcatccggacaaggaccaggtcctcccaagggggactgcgatgaggccctgtctgcttctgaacagcaagttgcccaggacacagaggaggtctttcgaagctacgttttttacctccaccagcaggaacaagagacccagggggcagccgcccctgctaaccctgagatggacaacttgtccctagaacccaacagtgtcttgggtcaggtgggtcggcagcttgctctcatcggagacgatattaatcggcgctacgacacggagttccagaatttactggaacagcttcagcccaccgctgggaatgcctacgaactcttcaccaagatcgcctccagcctatttaagagcggcatcagctggggccgtgtggtggctctcctgggctttggctaccgtctggccctgtatgtctaccagcgtggtttgactggcttcctgggccaggtgacctgctttttggctgatatcatactacaccattacattgccagatggattgcacagagaggtggttgggtggcagccctgagtttgcgtagagaccccatcctgagtgtagtggtaatttttggtgtggttctgttgggccaatttgtggtacacagattcttcagatcatgactgccccgggagctccagccacatgactgcctggactaaactaaacctctccccaacccactcccctgcaacagtcctctcctgcctctcagggcaaacaggcacccctgctttggaaagccacggcccgggggtcatggaggcagcatgaccaccccaacatcgcatggtgctactgaaccccatcctgtctcagaggggctgacagatgctctgggggggggggggtcgggcaagaggctgggccaccgcttcccagaaagttagttttagttttatactcccctctggatacaatcctcccttttcatccgctctgcccaaagtcagaacattggggaccagtggctctaacctgccttcccagcacacctgctactttggaaggtcggaagggacctaagcacagtcctgaccctccctacataggaccagctgtaggggtgtgtgatctaccctgccctcccacctcatcttccactatcccctcctttatcccccctccttctcccctcccctcccccgatccatttttgcctttgcggctggactctcagggattccgagcccagagtgagggcagaggtgagagctcagaccacagctgtctgaacacgtccatcaaggccctccaaaccccaagtgcctccctgaccactgctaccaacctagtgggtaagggaagaccctcaccttctccccagtgcctccctgctggggagggcagtcactctgacaggggaaggggtgggcattcagtgggaggtgctcacgctagagaactacaccagcaaaagcaactgtggatctggttgcaatgtgaccccccctaaacctgtgaatacttgaaccccaccttcacccatgctcctgttatgcctaggtcctcctcgggtggggtggggggtgtttttctctgtcttgcacaacataggggtgagaaaagtcttgattaagccaaatgtagcaagggtggggggaggcagatggattcccccacctcgccctcggtgtctggaaataaacggtgcaatgcccccaacacccc

SEQ ID NO: 3832 - DNA, 3286 bp, Rattus norvegicus
  Genbank Accession No. NM_053814
gacatgtcggcggccaaggaaaacccgtgcagaaaatttcaggccaacatcttcaacaagagcaagtgtcagaactgcttcaagccccgcgagtcgcatctgctcaacgacgaggacctgacgcaggcaaaacccatttatggtggctggctgctcctggctccagatggcaccgactttgacaacccagtacaccggtcacggaaatggcagcgacgattcttcatcctttatgagcatggcctcttgcgatatgccctggatgagatgcccaccacccttcctcagggcaccatcaacatgaaccagtgcacagatgtggtggatggggaggcccgcacagggcagaagttctccctctgcatcctaacacctgacaaggaacattttatcagggcagaaacgaaggagatcatcagtgggtggttagagatgctcatggtatatcctcgaaccaacaagcagaaccagaagaagaaacggaaagtagagccacctacgccacaggaacctgggcctgctaagatggctgtcactagcagtagtggtggcagcagtggaagcagcagcagcagcagcagcagcagcattcccagtgctgagaaggtccccaccaccaaatccacactctggcaggaagaaatgagagccaaagaccaacctgatgggaccagcctgagtccagttcagagtcccagccaaagccaacctcctgctgcttgcaccccacgggaaacagggctagacagcaaagaagatgaaaacattttaagtggggaccgtgtggatggtggtcggaaagtacgggtagaaagcggctacttctccctggagaaggccaagcaggacctgagggctgaggaacagctgcccccactactctctccacccagccccagcaccccacacagcaggaggtcccaggtaattgagaaatttgaggccttggacattgaaaaggcagagcacatggaaaccaacatgctgattctgaccactccatccagtgacactcgtcagggccgcagtgagagacgggccatccctagaaagcgggactttgccagcgaaacccccacagctcctctctcagatgcttgtcccctgtctccacaccgaagagccaagtcattggacaggaggtccacagaatcctccatgacgcctgacctgctgaatttcaagaaaggctggctaaccaagcagtatgaggatggccagtggaagaaacactggtttgtcctggcagatcagagcctgagatactacagggattccgtggctgaggaggcagctgacctagatggagaaattaacttgtccacttgctatgatgtcactgagtatccagtccagagaaactatggctttcagatacataccaaggagggtgagttcaccctgtcggccatgacatctggcatacgacggaactggatccagaccattatgaaacatgtgctcccaacatctgccccagatgtgaccagctcattgcctgagggaaagaataaaagcacatcttttgatacctgcttaaggccaagtgagaagcaagaagctgagccaggagaaccagatcctgagcagaagaaaagccgtgcacgagagcggaggcgggagggtcgctccaagacctttgactgggctgaattccgccccatccaacaggccctggctcaagaaagggccagcactgttgggtcttctgattctggtgaccctgggtgtctggaagccgagccaggtgagctggagcgtgaacgagctcgacggcgagaagaacgccgcaagcgctttgggatgctggacaccaatgatggaccaggaatggaggatacagccctacgtatggacattgaccggagcccagggctgctgggaacccctgacctcaagacacagaatgtccatgtggaaattgagcagcggtggcaccaagtggagaccacccctctcagggaggagaaacaggtgcccattgcccctctgcacctatccttagaggacagaagtgagcggctctccacacatgagctcacctctctgctagagaaggagctggagcagagccagaaagaagcttcggatcttctagagcagaatcggcttctgcaggaccagttaagggtggccctgggcagagaacagagtgcccgggagggctatgtgctgcaggctacatgtgagcgaggctttgccgccatggaggagacacatcagaagaagattgaagatctacagaggcaacaccagcgggagctagagaagctgcgggaggaaaaagaccgtctcctggctgaggagacagctgccaccatatcagccattgaagccatgaagaatgctcaccgagaggagatggaacgggagttagagaagagccagcggtctcagatcagcagcatcaattcagacatagaagccctgaggcgacagtacctggaggagctacagtcagtgcagcgagagctggaggtcctttccgagcagtactctcagaagtgcctggagaatgcacacctagcccaggcgctggaagctgagcggcaagccctgcggcagtgtcagcgtgagaaccaagagctcaatgcccacaaccaggagctgaataaccgcctggctgcggagatcacacggttgcggacactgctgactagagaaggtggtggggaatccactgggttgcctctcacacagggcaaggatgcctatgagttagaggtcttgttgcgggtcaaagagtcagaaattcagtacctgaaacaggagatcagctctctcaaggatgaactccagacagccctgcgggataagaagtatgcgagcgacaagtacaaagacatctacacagagctcagcatcgcgaaggccaaggctgactgtgacatcagcaggctgaaggagcagctgaaagcagccacagaggcactgggcgagaaatctcctgaaggcactactgtgtcaggatatgacataatgaaatctaaaagcaatcctgacttcctgaagaaagacagatcctgtgttacccggcaactcagaaacatcaggtccaagtccgtaattgagcaggtctcatgggataactgagtcgcgcccgcttccaagtcccctgtcgtagtctgaaggaaggcctgacggtgcaggagcgcttgaagctctttgaatccagggacttgaagaaagattagctgcatccattccactgacacatccttcccagctggtggcagcacaagccaagagtgggtttcatctgtgctttctcattgttgctgtcata

SEQ ID NO: 3833 - DNA, 2558 bp, Rattus norvegicus
  Genbank Accession No. NM_053818
ctcttgaggcctcttgtctgagaggcactgaacgcaggagtctgcaggtgtggtccagatctccagatcccccaacccactgccaccatggtaggaaaaggtgccaaagggatgctgaatggtgctgtgcccagcgaggccaccaagaaggaccagaacctcacacggggcaactggggcaaccagatcgagtttgtactgacgagcgtgggctatgccgtgggcctgggcaatgtgtggcgtttcccatacctctgctatcgcaacgggggaggcgccttcatgtttccctacttcatcatgctggtcttctgcggcattcctctcttcttcatggagctctccttcggccagtttgcaagccagggctgcctgggggtctggaggatcagccccatgttcaaaggcgtgggctatggtatgatggtggtgtccacgtacatcggtatctactacaacgtggtcatctgcatcgccttctactacttcttctcgtccatgacgcatgtgctgccctgggcttactgcaataatccctggaacacacctgactgtgccggtgtgctggatgcttccaatctcaccaatggctcccggcccactgccctgtctggcaacctgtctcacctgttcaactacaccttgcaaaggaccagccccagtgaggagtactggaggctgtatgtgctgaagctgtcggatgacattggagattttggagaagtgcggcttcctctcctaggctgccttggcgtctcctgggtggttgtcttcctctgcctcattcgaggagtcaagtcttcagggaaagtggtgtacttcacggccacatttccctatgtggtgctgaccattctgtttgttcgtggagtgaccctggaaggagccttcacgggtatcatgtactacctgaccccaaagtgggacaagatcctggaggccaaggtgtggggggatgcagcctctcagatcttctattccctgggctgtgcatggggtggcctcatcaccatggcatcctacaacaaattccacaacaactgctaccgggacagcgtcatcatcagcatcaccaattgtgctaccagtgtctatgctggcttcgtcatcttctctatcctaggcttcatggccaatcacctgggtgtggatgtgtctcgggtggcagaccacgggcccgggctagctttcgtggcttaccccgaggctctcacactgcttcccatctccccgctctggtccttgctgtttttcttcatgctcatcctgctgggactcggtactcagttctgcctcctggagaccctagtcactgccattgtggatgaggtggggaatgagtggattctgcagaagaagacctacgtgaccttgggtgtggctgtggctggcttcttgctgggtatccctcttaccagccaggcgggcatctactggctgctgttgatggacaactacgcagccagcttctccttggttgtcatctcctgcatcatgtgcgtgtccatcatgtatatctatgggcaccggaactacttccaggacattcagatgatgctggggttcccaccgcctctcttcttccagatctgttggcgttttgtctctcccactatcatctttttcattctcatcttcacggtgatccagtaccggccaatcacttacaaccactaccagtacccaggctgggctgtggccatcggcttcctcatggctttgtcgtctgtcatctgcatcccattgtacgcattgttccagctctgccgcacagatggggacacacttcttcagcgtttgaaaaatgccacaaagccaagcagagactggggccctgccctcctggagcaccggactgggcgctatgcccccactacaaccccctctcctgaagatgggtttgaggttcagccactgcacccggacaaggcccagatccccatcgtgggcagtaacggctccagccgcctccaggactcccggatatgagcacagttgttgcaaggggagaagccccacccaacccttgctcctaccacagagactgaggaggtggtggaccggtgtgactgcctgccccatcatgccctggccagggtggctgctgtcaccttggccaccactgctcatgtccccagtgtttacacatcctttggatgccaagacagcagctgggggtggaaaagtgatgggggtgggggggaggtgcgtgggggtggggcatggggcggcagtgtccaaagcactttggaggaggtctcaggccatgtccccagaggcttccaggcttcattatccctcatgctctgccctgagctgtttcactacgggataagaggttttgtttccacaccccacctgttcccctccagcctcatgaccagtgttcctgaccccagaacagaccctagcctcttgcccaggcaaatctgtatcttcctgctccggacaaggtgaggcgcccgggggctgtacagtgttacttgttggactgcaccactcagccctgtttatttgtgtaattatttttttaaaaaattgtattacctgtggttgcc

SEQ ID NO: 3834 - DNA, 740 bp, Rattus norvegicus
  Genbank Accession No. NM_053819
cggactcctagagacacgctagagcagataccacgatggcgccctttgcatctctggcctctggcatcctcttgttgctatcattgatagcttccagtaaagcctgtagctgtgccccaacccacccacagacagctttctgcaactcggacctggttataagggctaaattcatgggttccccagaaatcatcgagaccaccttataccagcgttatgagatcaagatgactaagatgctcaaaggattcgacgctgtgggaaatgccacaggtttccggttcgcctacaccccagccatggagagcctctgtggatatgtccacaagtcccagaaccgcagcgaggagtttctcatcgcgggccgtttaaggaacggaaatttgcacatcactgcctgcagcttcctggttccctggcataatctgagccctgctcagcaaaaggccttcgtaaagacctatagtgctggctgtggggtgtgcacagtgtttccctgttcagccatcccttgcaaactggagagtgacagtcattgcttgtggacagatcagatcctcatgggctctgagaagggctaccagagcgatcactttgcctgcctgccacggaatccagatttgtgcacctggcaataccttggggtctcgatgacccgaagccttcccctggcaaaagctgaagcctgaacactgtttacctttcctccatctttctttctcttaaatggtgaaataaag

SEQ ID NO: 3835 - DNA, 2074 bp, Rattus norvegicus
  Genbank Accession No. NM_053821
cggcggctccctcagctcctcatctgggccatctgtccgtgtgtcgctgcctcagaccagcaggatggctgccaacaaaggcaagagccagggctccctggtccttcacaaggtcatcatggtcggcagtgggggagtcggcaagtcagccctgacgctccagttcatgtatgacgagtttgtagaagactatgagcccaccaaagccgacagttacagaaagaaggtggttctcgacggagaagaggttcagatagacatcctggacacagccggccaggaggactatgcggccatccgtgacaactacttccgaagcggagaaggctttctgctggtgttctccatcacggagcacgagtctttcaccgccacagccgagttcagggaacagatcctccgagtcaaggccgaggaggacaaaatccctctgctggtcgtgggcaacaagtctgacctggaggagcggaggcaggtgcccgtggaggaggcccgaggcaaagcggaagagtggggtgtgcagtatgtggagacatccgcaaagacccgagccaacgtggacaaggtgttctttgatctgatgagagaaatccgggcaaagaagatgtcggaaaacaaggacaagaacggcaggaaaagcggcaagagcaagaagagtttcaaagagcggtgctgcttgctgtgagcgggccgcggacagagcgagcggagaaggccacattgcagcgcgccgagcccaggtggcctccccctggctccccgtctccagcagctgtaattcactatcacttcttgaagatggacagatacctgtgcaaaccagtggctggcaggagaaagacgcacttcgtctgtgcgtctgtgcgatgcatctgctaacgttgccaggagctttgagagtctgccccctcccaccctccctgaaccgtgactgtcaccagactctagggtcaggaatctgagttgtgttgacaagaaagaggattgccacggcggcttgtccccccctgttctaggacatggtcatcttttgttggaaaatcaaaatgcttcacattagcagggcgtgctggtgcacccctgtagtcccagaactctagaaggtaaggcagggagggtagcctgagcccaaggccccaaggcctgggctacctagcaagaccctgtctctaaaaggaaaaagaactaacatcttattttcttagatttaaaaagagggtctctggcaagacccctcgttagttcttatcagtttagaagtagacagggggcggaaaacctaagctcaggtaatactgaaaaagccaaaacaatttgttttttttttttttttctgttttaaaagataaacttctgtgacttggaagcagaattagaaagatgaacttcacttggtccagataggctgaaccaagcctcctggcgtttgtagagaagtgggacgctgttcccttcatacttaaatgccagccaggtgctggctgtgggcttccctccctaacacccttacttagtagtgaggaaactttgtgtgggggagatgtagcctgtgccccagaacaagctttcttttttctgactggatcatctcaccttttctggttccctcccactccagccataggcctgttctttttcttcctttctgaaaaatgtgaccagttcaaattatgtcccaggacacgggccagcgccagctacctctgcagactctacaagcggaagaggggaaggctcagaagggagggccatctcctgtagctcccggcagttggttctggtgacactgacatgaaccaggttccagaggctcacacccactctctgttaagcctcctctcggggaaggggactctgggactgggggctgccactgagcacacacactcctcccattttccagaagtgaacatttcacttttggtgccgaatgtgaatctgggtgggaagagcgggagcccttctaatggatttttttttacagagttatggaatccaaggtctgatccctggaaacttgtgtcacttccaaagaatcatgggctttttcgaattaaaaaaaattacacttttc

SEQ ID NO: 3836 - DNA, 982 bp, Rattus norvegicus
  Genbank Accession No. NM_053835
gggagctgacagcagccacgcggggaagatggctgaggacttcggcttcttctcgtcgtcggagagcggggcccccgaggccgccgaggaggacccggcggccgccttcctggcccagcaggagagcgagattgctggcatcgagaatgactcgggtttcggggcacctgccgccagccaggtggcctctgcgcagcccggactcgcgagcgggggtggttcggaggacatggggactacagtcaatggagatgtgtttcaggaggctaacgggcctgccgatggctacgctgcgattgcccaggcggacaggttgactcaggagcctgagagcatccgcaagtggagagaggagcagaagaaaaggctgcaggagttggatgctgcctcgaaggtgaccgaacaggagtggcgggagaaggccaaaaaagacctggaggagtggaaccagcgccaaagtgaacaggttgagaagaacaagatcaacaacaggatcgctgacaaagcgttctaccagcagccagatgctgataccattggctatgtggcatcggaagaggcttttgtgaaagaatccaaggaggagaccccaggcacagagtgggagaaggtggcccagctgtgtgacttcaaccctaagagcagcaagcaatgtaaagacgtgtcccgcctgcgctcggtgctcatgtccctgaagcagacgccactgtcccgctagtgcctgtcaccacgggccttggtggggcagagcagcagctgcttcagccagggtggaacttctctggcagctgccacacacgcctgttctgttcctctgagtctctgggagctgggaagcgggacccttacccctttcacccaccctgtccttcctggtcccctgttccagcccctcatgactcctgtcagtccacttgattgtgactgtccctcctgatgtatttttcttggcttaaagggtgtgttaactctttttacactt

SEQ ID NO: 3837 - DNA, 1467 bp, Rattus norvegicus
  Genbank Accession No. NM_053842
ccgtggttctaccggcggttagttctctcttctgtgttgtcctccctcctcgttcccgatcgccgccagccggctacacgggcggcggcgcggttcctgtgggaagcgcagcacaagtcgagcggtaacgcgaagcgtcgagcccaacgcggcggaggctgtgcagccaacatggcggcggcggcggcggcgggcccggagatggtccgcgggcaggtgttcgacgtggggccgcgctacactaatctctcgtacatcggagaaggcgcctacggcatggtttgttctgcttatgataatctcaacaaagttcgagttgctatcaagaaaatcagtccttttgagcaccagacctactgtcagagaaccctgagagagataaaaatcctactgcgcttcagacatgagaacatcatcggcatcaatgacatcatccgggcaccaaccattgagcagatgaaagatgtatatatagtacaggacctcatggagacagatctttacaagctcttgaagacacagcacctcagcaatgatcatatctgctattttctttatcagatcctgagaggattaaagtatatacattcagctaatgttctgcaccgtgacctcaagccttccaacctcctgctgaacaccacttgtgatctcaagatctgtgactttggccttgcccgtgttgcagatccagaccatgatcatacagggttcttgacagagtatgtagccacgcgttggtacagagctccagaaattatgttgaattccaagggttataccaagtccattgatatttggtctgtgggctgcatcctggcagagatgctatccaacaggcctatcttcccaggaaagcattaccttgaccagctgaatcacatcctgggtattcttggatctccatcacaggaagatctgaattgtataataaatttaaaagctagaaactatttgctttctctcccgcacaaaaataaggtgccgtggaacaggttgttcccaaacgctgactccaaagctctggatttactggataaaatgttgacatttaaccctcacaagaggattgaagttgaacaggctctggcccacccgtacctggagcagtattatgacccaagtgatgagcccattgctgaagcaccattcaagtttgacatggagctggacgacttacctaaggagaagctcaaagaactcatttttgaagagactgctcgattccagccaggatacagatcttaaattggtcaggacaagggctcagaggactggacgcgttcagatgtcggtgtccccccagttcttgaccctggtcctgtctccagcccgtctcagcttacccactcttgactcctttgagccgttccgaggggcagtctggtcgtagtggcttttatactttcacggaattcttcagtccagagagttctcctgcaccaggccctgcacagttgcactcag

SEQ ID NO: 3838 - DNA, 1318 bp, Rattus norvegicus
  Genbank Accession No. NM_053843
acctcatcagactctgacccagttcttgaatgactttggagacccagatgtttcagaatgcacattctggaagccaatggctactcccaccactgacaatgttgctgctgtttgcttttgcagacaggcagacggcaaatcttccgaaggctgtggtgaaacgtgatcccccatggatccaggtgctcaaggaaggcactgtgacgctgacgtgcgaagggacccacaatcctggaaactcttctacccagtggttccacaaccagagctccacctggggccaggtccaagccagctacacgtttaaggccacagtcaatgacagtggagaataccggtgccgaatggcgcacaccagcctcagcgaccccgtacatctggaagtgatttctgactggctgctgctccagacccctcaactggtgtttgaggaaggggaaaccatcacattaaggtgccatagctggaagaacaaacagctgactaaggtcttgttgttccagaatggaaaacctgtgaggtattattatcaaagcagcaatttttcaatccccaaagccaaccacagtcacagtgggaactactactgcaaagcatatctaggaaggacaatgcatgtgtccaagcctgtcaccatcactgtccaaggttcagcaacggcatccaccagctctctagtgtggttccatgccgctttctgcctagtgatgtgcctcctgtttgcagtggacaccggcctgtatttctgtgtacggagaaatcttcaaacctcgggggaggactggaggaaatccctgtcagtcggaaagtacaaggctccacaggacaaatgacatcccatcgtatggctaaacagcggcagcttcttttcagccacaccgccgcttcatctacagccttcctttgaaagcaacttaccaccaggctggatatttggtcctgcaatcacaactgctaggaggctgaggcaggagggtcaccaaaggctgcccgggttttagagaagagagagtgcaagtctatcctggataacccaataagaccctgggtttagatggcttatcaggaaagagcacccattgctaagctcacagacaagaccacagattgatccctaaggacacagggcaaagggagagaacaaattcctgaaagttgtcctctgacctccacacgtccaccatggcagatgcacacaataaacaaattaaaatgtaatatatatattttaaacaagaggtggggaaaggctgggggttggtggcacagtttttatccaggacacatgatgctctggattttgacctcctataataaa

SEQ ID NO: 3839 - DNA, 2398 bp, Rattus norvegicus
  Genbank Accession No. NM_053849
atggcgaaggctgtgtgatgctcatagggagaagaagatgttgatgtattgattgatgaccagctcccggtataggctgaaggctcaggctgcggggtggggccggtgtggcggggcgccaccgtctcgccctgattcgtgcggggattggacggctgcggcttccttgcctctaaccaatcaccgggctgaacttcctggaggttttggtgcgctccagcgtcgcttgggaggtcggcgagtgcttcgctgtggtgggtgtctgcaggcctccctcggcaccttaccatgaagctccggaaagcttggctgttggtcctgctcttggcgctgacacagctgctggctgctgcgagcgccgaagatgcgcacgaagatgcttcagattcagaaaatcccattgaggatgacgacgaggaggaggaagatgaagaagatgaagatgacttggaagttaaggaagaaaatggtgtttgggtcctaaacgatgaaaacttcgataactttgtggctgacaaagatacagtgctcctggagttctatgcaccgtggtgtggacactgcaagcaatttgctccagaatatgagaaaattgccagtactttgaaggataatgatcctcccattgctgttgcaaagattgacgcgacctcagcatccatgttggccagcaaattcgatgtgagtggctaccccaccatcaagatcctgaagaagggacaggctgttgactatgacggctccaggacccaggaagaaattgttgccaaagtcagagaagtttcccagcctgattggacacctccacctgaagtcactcttacattgactaaagagaactttgacgatgttgtaaataatgcagacatcattttggtggagttctatgccccatggtgcggacactgcaagaaacttgcccctgagtatgagaaggctgccaaggagctcagcaagcgctctcccccaattcccttagccaaagttgatgccaccgaacagacagacctggctaagaggtttgatgtctctggctaccccactttgaaaatattccgcaaaggaaggccttttgactacaatggtccacgagagaaatatggaattgttgactacatggttgagcagtctggacctccttccaaggagattctgaccctgaagcaggtccaggagtttctgaaggatggagatgatgtagtcatccttggagtctttcagggagtcggtgacccaggctacttgcagtatcaggatgctgctaacaccctgagagaagattacaaatttcaccacactttcagcactgaaatagctaagttcctgaaagtctccctggggaaactggtgctgatgcagcctgagaagttccagtccaagtatgagcccaggatgcatgtgatggatgttcagggctccacagaggcatcagccattaaggactatgtggtgaaacatgacttgcccctagtgggccacaggaagacttctaacgatgctaagcggtacagcaagcgccccctggtggttgtatactacagcgtggacttcagctttgattacagaactgctactcagttttggcgtaacaaagtcctagaggtggccaaggacttccctgagtacacattcgccattgctgatgaagaagactatgccacagaggtgaaggacctgggactgagtgagagtggagaggacgtcaatgcagccatcctagatgagagtgggaagaagtttgccatggagccagaggagtttgattcagatgctctccgagaatttgtcatggctttcaaaaaaggaaaactaaagccagttatcaaatcacagccagttcccaagaacaacaagggaccagtcagggtggtagtggggaagacctttgatgccattgtgatggaccccaaaaaggacgtcctcattgaattctatgcaccgtggtgtgggcactgcaagcagctggagcctgtctacaccagcctaggcaagaagtacaagggccagaaggacttggtcatcgccaagatggatgctactgccaatgacatcaccaacgaccgatacaaggtggagggcttccccaccatctattttgcccccagtggggacaaaaagaacccaattaagtttgagggtggcaacagagatctggagcatttgagcaagtttatcgatgaacatgccacaaagaggagcaggaccaaggaagagctttaaggcctggctgtgtgcagaaggtggagggatcagacactgtagtggacagctttggccaccaagcaagcaagccgtcattgaatggcaggatcttgaccctttttttgttatattttattaatgccacctcatgctctgatactgatagcatgatgacttgatagtttagatcagattt

SEQ ID NO: 3840 - DNA, 2533 bp, Rattus norvegicus
  Genbank Accession No. NM_053853
ggagaggagaggagagggaaagccagccaagaacacatggagagaggggaggggatgtggaaagagggagaaggcgcagagagtaagagagcaagggcgtcaaacagcccctttaagagtaagccaggcatgcctggctaatgccaggtaactgtgggggcagagcctagaggggatgctaacagagctcatctcagtccactcttctcacccagtctgccccagtcaccctgtctttgtatccaccccttctgctaggaaacaccatcctcacacatccgtggagctcactgtctgtcatccttcggatgcaagtgtggctttcttcatccatattagttcccatcaaaactctccttctacctctctattttagttatcctgtggacagctactacacttctcttttttgtttttaaattacttatgtattattttaatacccactgaaatgcaagattttggagggcaagaaagcatagcaagtatctaaaggatgttcagtgaagggatgacttggtcaatcagtgtagctcattcagtaaggagcctcatagagcacccagtgcagtgatgaatgggtcactcgccatggcattctctagtgtgtaagtctcccatttttgtgaataactgtttgaaagattattttggcaatatctacctttcatcaccaaggtaaccacatctaatctctcttttgactggtcatttagccttattttctacctcaaaaacttgaaagatacaaggaataacaaaactttcctctaaggctctctgagagtatttaatgaacagcaggtaaaagcaagccaggctgtagaggtgacatgattgcctaggagctatgtagaggcatctttcatgtatacacgttaacaacacattcgaactacagttagctgactctgggacacccagaagaattgatgtcatgtttgtctgctttcatcctgtttgccttagggagccatggacatcgaagcatacttcgaaaggattggttacaagaactcagtgaataagttggacttggccacattaactgaagttcttcaacaccagatgcgagcagttccttttgagaatcttagtatgcactgtggagaagccatgtgtctgggcttagaggccacttttgaccacatagtaaggaaaaagcggggtgggtggtgtctccaggttaatcatctgctgtactgggctctgaccaaaatgggttttgaaaccacaatgttgggaggatatgtttacataactccagtcaacaaatatagcagtgaaatggtccaccttctagtacaagtgaccatcagtgacaggaactacattgtggattctgcctatggaagctcctaccagatgtgggagcctctggaattaacctcagggaaggatcagcctcaggtgcctgccatctttcgtttgacagaagagaatggaacctggtacttggaccaaatcagaagagagcaggatgttccaaaccaagagtttgttaactcggacctccttgaaaagagcaaatatcgaaaaatctattcctttactcttgagccccgcactattgaggattttgaatatgtaaatacctaccttcagacatcgccagcctctgtgtttgtaagcacatcgttctgttccttgcagacctcagaaggggtttgctgtttaattggttccacccttacaagtaggagattcagttataaggacaatgtagatctggttgagtttaagagtctgactgaggaagaaatagaagatgtactgaaaaccacatttggcatttctttggagaaaaagtttgtgcccaaacatggcgaactcgtttttactatttagggtaaattgttctccattattatctcagtcttaaacattctaaaaatatgcaaatacatatccataacagaaatcgcacagctcaatattgatcaactaatgacctgtatcttctatttcctacattttatacaaaacgaaacccagttgtcctgtcatttcaccaataaaaataccgccagttataatgaaataaacctgatcatggatgtaacgacaatcctctcaacattaatcaacaaaaattacttatcgaagaggtggcgatcttgggagccatattcatttacaaacctcccaacatcattttatggttgaactcagatgaaaaatgaatgaatatgaatgatcagagaacagcaggaagtaaagtcaggcagactaaatctgaggtccaaggtttacaagaaaccacctgtacaacttaggattagaataaagcaaagaagaatgaaccatcattacaggtccaggtaacttcccagtcctcaaaacagaactcacgccagtggacctgggctctgggattaggtgccaagacaatgacacggcttagaaggcttagaatttcttccagagataattttgcagacacagttctttttgtatctgattttttttaactatgagaatactggtattaagtgatttataccttatatataataatctttgtagcctataa

SEQ ID NO: 3841 - DNA, 1385 bp, Rattus norvegicus
  Genbank Accession No. NM_053854
cctcccaccagcttcctggtctcaggccctgctacaccggacatggtcttccatctctcggaacatttcttcaagaactcggcgaagttgaccgacgagtcgggatgcttcttcttgtgctcctcctggcacgaagaaggcgtacgaggacatcttgccccgcggcttgttggggtcccccttgcccatgatgaccgcgcagcgtctacctggcgcgagctcttccctcagacttccacagagagacttccttccccaagctccggcgagaactggtcctgagtagggtttatataacacttgtgcaattgactggaaaccatggacattgaagcatactttgaaagaattggttatcagagttccaggaacaaactggacttggaagaattaactgaaattcttcaacaccagatacgggctattccctttgaaaacttgaacatccattgcggggaatccatggagctgaatttagaagtcatctttgatcaagttgtgaggaagaagcgtggtggatggtgtctccaggttaatcatctgctgtactgggctctgaccaaaatgggctttgaagccacaatgttgggagggtatgtctttaacactccagccaataagtacagcagtggcatgattcacttactagtgcaggtgaccctcagtggaaaggactacattgttgatgctgggtttggacgttcctaccagatgtgggagcctctggaattaacatcagggaaggatcagcctcaggtgcctgccatctttcgtttgacagaagagaatggaacctggtacttggaccaaatcagaagagagcagtatgttccaaaccaagagtttgttaactcagacctccttgaaaagaacaaatatcgaaaaatctattcctttactcttgagccccgcactattgaggattttgagtccattaatacctatcttcagacatcgccagcatccttgtttacaagtaaatcattttgttccttgcagaccctagaaggggttcactgtttggttggctccaccctcacttataggagattcagttataaggacaatatagatcttgtagagtttaagagtctgactgaggaagaaatagaagacgtactgaaaactatatttggggtttctttagagagaaagcttgtgcctaaacatggtgatcgattttttaccatttagaatatgcagttttggtgtccttccatgtacttggactttatgttaaaatgttcaaactggtgacaaggacatacttctgaccatgttgatgtatgcgaacaaaaacccaccattggcttacagccaaatttatacagaatttgtgctaatagttaagtaaaaggaatagtgtgaaaagcattcccattcaa

SEQ ID NO: 3842 - DNA, 843 bp, Rattus norvegicus
  Genbank Accession No. NM_053857
gggccgaggtgccgcggggttgctggagggtcgtgggcggcgtgcaggagacatgtcggcgggcagcagttgcagccagactcccagccgggctatccccactcgccgcgtagccctcggcgacggcgtgcagctcccgcccggggactacagcaccacccccggcggcacgctcttcagcaccaccccgggaggaaccagaatcatctatgaccggaaattcctgatggagtgtcggaactcgcctgtggccaaaacacccccaaaggacctgccaaccattccaggggtcactagccctaccagcgatgagcctcccatgcaggccagccagagccatctgcacagcagcccggaagataagcgggcaggtggtgaagagtcacagtttgagatggacatttaagggaccagccataggacgcagtgatgcttctgggcccctggggcccttgggaggagagccacagcagtcaggccttgtacccggcagacactgggtgtggatcggccacccagtcctgctcctcactcagggcacctgctctgccttccattttgtgaataccagcacatacctccttgtgcctctgttgatactgagctgctactccagggtaatgactctcacctacaccctccctgcatcaagcgccagcgagtggacacagaggagtctgtcggaatgatctggcaattctagccccaacctctggagcacacccaccttaccttaggttggggtacctgggaaagccaccctttacttctttccctgagaggaaataaaagccacatttaccctaggcccacagccgggccctgtctgaaaaaaaaaaaaaa

SEQ ID NO: 3843 - DNA, 2870 bp, Rattus norvegicus
  Genbank Accession No. NM_053864
gaattccggcgtttgcagccgtcgtttgattagtcgcctctcgcggattaggagctagcgtctcccgcccgcctgccgccccggtgccgctgggaggaagcgagagggaggctgcctgtgggtttgtcactgctgttgctcctccacctgagtgagtcaagcccgggcctagtcggtcgcctaccattctcgtagccgttaccctcaggccgccacagccgccgaccgggagaggcgcgcgccatggcctctggagccgattcaaaaggtgatgatttatcaacagccattctcaaacagaagaaccgtcccaatcggttaattgttgatgaagccatcaatgaagataacagtgtggtgtccttgtcccagcccaagatggatgaactacagttgttcagaggtgacacggtgttgctaaaaggaaagaagagaagggaagctgtatgcattgttctttctgatgacacgtgttctgatgagaagattcgaatgaatagagttgttcggaataacctccgagttcgcctaggagatgtcatcagcatccagccatgccctgatgtaaagtatggcaaacgtatccatgtgctacccattgatgacacagtggaaggcatcactggcaatctttttgaggtataccttaagccgtacttcctggaagcatatcggcccatccgtaaaggagatattttccttgtccggggtgggatgcgtgctgtggagttcaaagtagtagagacagatcccagcccttactgtattgttgctccagacacagtgatccactgtgagggggagccaatcaagcgagaggatgaggaggagtccttgaatgaagtaggctatgatgacatcggtggttgcaggaagcagctagctcagataaaggagatggtggagctgccactgagacatcctgcactctttaaggcaattggtgtgaagcctcctcggggaatcttgctatatggacctcctgggacagggaaaaccttgattgcccgagctgtggcaaatgaaactggagccttcttctttctgatcaatggtcctgaaatcatgagcaaattggctggtgagtctgagagcaaccttcgtaaagcctttgaggaagctgaaaagaatgctcctgccatcatcttcatcgacgagcttgatgccattgcacccaaaagagagaaaactcacggggaagtggagcgtcgcatcgtgtctcagttgttgacccttatggatggcctaaagcagagagcacatgtgatagttatggcagcaaccaatagacccaacagcattgacccagccctacggcgatttggtcgctttgacagagaggtagatattggaatccctgatgctacaggacgtttggaaattcttcagatccataccaagaacatgaaactggcagatgatgtggacttggaacaggtagccaatgagactcatggtcatgtgggtgctgacttggcagccctgtgttcagaggctgctctacaggccatccggaaaaaaatggacctcattgacctagaagatgagaccattgacgctgaggtcatgaattccctggcagttactatggatgacttccggtgggccttaagtcaaagcaacccatcagcacttcgggaaactgtggtagaagtgccacaagtaacctgggaagacattggaggcctggaggatgtcaaacgggagcttcaggagttggttcagtatcctgtggagcatccagacaaattcctcaaatttggcatgactccttccaaaggtgttcttttctatggaccgcctggctgtgggaaaaccttactggccaaagccattgctaatgaatgccaggctaacttcatctccatcaagggtcctgagctgcttaccatgtggtttggggaatctgaggccaatgtcagggaaatatttgacaaggcacgacaagctgccccctgtgtactcttctttgatgagttagattcaattgccaaggctcgtggtggtaatattggagatggtggtggagctgcagaccgagtcatcaatcagatcctgacagaaatggatggcatgtccacaaaaaagaatgtgtttatcattggagctaccaaccggcctgacatcattgatcctgctatcctaagacctggccgtcttgatcagctcatttatatcccacttcctgatgagaagtcccgtgttgccatcctaaaagccaatctgcgaaaatccccagttgccaaggatgtggatttggagttcttggctaagatgactaatggcttttctggagctgacctgacagaaatttgccaacgtgcttgtaaactagccattcgtgaatctatcgagagtgagattaggcgagaacgagagaggcagacaaatccatcagctatggaagtagaagaggatgatccagtgcctgagatccgcagagatcactttgaggaagccatgcgttttgcccgacgttctgtcagtgataatgacattcggaagtatgaaatgtttgcccagacactgcagcaaagtcgaggttttggcagcttcagattcccttcagggaaccagggtggagctggcccaagtcagggcagtggaggtggcacaggtggcaatgtgtacacagaagacaatgacgatgacctctatggctaagtgatgtgccagcatgcagcgagctggcctggctggaccttgttccctgggggtgggggcgctcgcccaatgggaaccaggggtgtgcccatggcctgttccattcctcagtccgaacagttcagccccagtcagactctggacgggggttttctgttgcaaaaaaattacaaaagcgataaaataaaagtgattttcatttggga

SEQ ID NO: 3844 - DNA, 2451 bp, Rattus norvegicus
  Genbank Accession No. NM_053866
tgagctgctcgctaccgggccacgaactggacgtgaggggcctggtgtgctgcctctacccaccgggagcctttgtgtctgtgtcccgggatcgtaccacccgcctctgggctccagacagtcctaacaggggctttacagaaatgcactgtatgagcggccactctaattttgtgtcttgtgtgtgcatcataccctcaagtgacatatatcctcatggactaattgccactggaggaaatgaccacaatatttgcattttctcgctggacagtccgatgccactttatattttaaagggtcacaaagatactgtttgtagtctttcttctggaaaatttgggacattacttagtggctcatgggacaccactgctaaagtctggctgaatgacaaatgcatgatgacattacagggtcacacagctgcagtatgggcagtaaagattttacctgaacagggcttaatgttaactggatcagcagacaaaacaattaaactatggaaggccggaagatgtgagaggactttttcagggcatgaagactgtgtaagaggtttggcaattttgagtgaaacagaatttctttcctgtgcaaatgatgctagtattagaaggtggcagataactggcgagtgtcttggagtatactacggacatacaaattatatttatagcatatctgtctttccaaattgtagagattttgtgacaactgcagaagacagatctctaagaatatggaaacatggtgaatgtgcccaaacaatccgacttccagctcagtctatatggtgctgctgcgtactggacaatggtgacattgtggttggtgcgagtgatggtattattagagtgtttacagaggcagacgagcggacagccagtgccgaggaaatcaaggcttttgagagagagctctctcaggcaactatagactccaaaactggcgacttgggggacattaatgctgagcagcttcctgggagggaacatctgaatgagccaggtactagagaaggacagactcgtctaatcagagatggagagagagttgaagcctatcaatggagtgttagtgatggcaggtggataaaattggtgatgttgttggctcatctggtgctaatcagcaaacatctggaaaagttttatatgaagggaaagaatttgattatgttttctccatcgatgtgaatgaaggcggaccatcatataaattaccatataatgtcagtgacgacccctggctggttgcatacaacttcttgcagaaaaatgatttgaatcccatgtttctggatcaggtggctaaatttattattgataacacaaaaggtcaaacactgggacttggaaataccagtttttcagacccatttacaggtggtggtcgctatgttccaggaacttcagggccttccaacacagtgcagacagcagatcctttcacaggtgctggtcgttatatgccagggtctgcagggatggataccaccatggctggagttgatccatttacaggaaatagtgcctaccgatcagctgcgtttaaaacagtgaatatttatttccccaaaaaagaagctcttaccttcgaccaagcaaaccctacacaaatattaggaaaactgaaggaacttaatggaagtgcacctgaagagaagaagctaactgaagatgacttggtacttctggaaaagatactgtccctgatttgtggtaatgcttcagaaaagccgacggcccagcagcttcaggttctgtggaaagccatcaactggcctgaagacattgtctttcccgcacttgacattcttcggctatcaattaagcatcccagtgtgaatgagaatttctgcaatgaaaaagaaggagaccagttcagcagccaccttatcaaccttctgaaccctaaaggaaagccagcaaaccagctgcttgctcttaggactttttgcaattgctttgttagtcaggcaggacaaaagctcatgatgtcccagagggagtcattgatgtcacatgcaatagaactgaaatccgggagcaataagaacatcatattgctctggctacactgaccttgaactattctgtttgtttccataaagaccataacattgaagggaaagcccaatgcttgtcagtgattagcacaatcttggaagttgtacaagacctagaagccacatttagactccttgtggctcttgggacacttatcagtgatgattcaaatgctatacaattagccaaatctttaggtgttgattctcaaataaaaaagtatgcttctgtatcagagccagctaaagtaagtgaatgctgtagacttgtcttaaatttgctgtagcagtggggaaaggaagctgaggggttttcttttttttgttttgttttgttttgtttttttccacattttacatgactgattggagatgattta

SEQ ID NO: 3845 - DNA, 794 bp, Rattus norvegicus
  Genbank Accession No. NM_053867
ccgcaccgctccgcgtgcaccgcactcgctccgactgtcaggctagcgccactgtccccagccgtcaccatgatcatctaccgggacctcatcagccatgacgagctgttctccgacatctacaagatccgggagatcgcggacgggctgtgcctggaggtggagggcaagatggtcagtagaacagagggtgccatcgatgattcactcattggtggaaatgcttccgctgaaggtccggagggcgaaggtaccgaaagcacagtagtcaccggtgttgacattgtcatgaaccatcacttacaagaaaccagcttcacaaaagaggcctacaaaaagtatatcaaagactacatgaaatcactcaagggcaaacttgaagaacagaaaccagaaagggtaaagccttttatgactggagctgcagagcaaattaagcacatccttgctaatttcaataactaccagttttttattggtgaaaacatgaatccagatggcatggttgctctactggactaccgtgaagatggtgtgactccattcatgattttctttaaggatggcttagagatggaaaaatgttaacaaattggatctatcgcctgtcaccataattggctgctgcttaccatccatacaacaccaggacttaggacaaatgggactgatatcatcttgagcttttattttgaccgtgatttatttggagtggaggcattgtttttttttttttttaaagaaaaaaaaacatgtcatgtgggttgtctaaaaataaagtgcatttaaattca

SEQ ID NO: 3846 - DNA, 667 bp, Rattus norvegicus
  Genbank Accession No. NM_053884
ggcacgaggggcatcactgctgtttggggagccttctgccgggccgacaggatggcgggcaggggtaaactaatcgcagtgattggagacgaggacacggtgactggtttcctgttgggcggcataggggagcttaacaagaaccgccaccctaatttcctggtagtggagaaggataccaccatcaatgaaatcgaagacactttcaggcagtttctaaacagggatgacatcggcatcattctcatcaaccagtacatcgcagagatggttcggcacgccctcgatgcccaccagaggtccattccagccgtcctggagatcccgtccaaggagcatccctacgacgcagccaaagactccatcctgcgcagggccaagggcatgttcactgctgaagacctgcgctagggctgctcagcccttaaccctcctctcgcttccaggcctctcccagtttgccaccctctatttaagtttcaagccttggtttccagcccctcccttcctcttcactgagtggttcctaagctgttggggttctgatgttcaggtccaggctgggtagggaaagaaaggccaaccatctctccactacctatgccattgagcagtatcattgttaacattaaaggaatattctctccgaaaaaaaaaaaaaaaaaaa

SEQ ID NO: 3847 - DNA, 5180 bp, Rattus norvegicus
  Genbank Accession No. NM_053887
gaattccgcacccggggcgggacaagaggtctgctttccaaagagaaggcttcgcgtctgtctgcagcaggcgacagtcccgggcgccacctgcgcttcgggcgcgggccaggctggtgcgcgccgggcccccagcgcccgctactgagagcgtgaagtgaccgaccgtgagtcctccggcttgcgtccccttccagcaccagggactcacgccccaattactgcttgctcaagggtggacgagctccggccgagccgctgccccgccccgtactacctggcagctgcccgggtgcagcgcacagcgccccgcgcggccccagcagagcccctgccctcccacctgcgccgcgcgcccgccgctccgtgctcccgagacaggagacgcggccccgctcccgctcgcgcccgcgcactcggcgcagcgcgcgcgcccgccgctccgcccgccccccgcgctctccccgccccctccctcccccgcaggcacgagcgaatgtagcccgcgagagaaaatggcggcggcggcgggcgatcgcgcctcgtcgtcgggattcccgggcgccgcggcggcgagccccgaggcgggcggcggcggcggagctctccagggaagcggcgcgcccgcagcgggcgcggggctgctgcgggagactggcagcgcgggccgcgagcgcgcggactggcggcggcagcagctgcgcaaagtaaggagtgtggagctggaccagctgccggagcagccgctcttcctcaccgcctcgccgccctgcccatctacttccccgtcgccggagcccgcggacgcggctgcaggagcgagtggcttccagcctgcggcgggaccgccacccccgggagcagcgagtcgctgcggctcccactctgccgagctggcggccgcgcgggacagcggcgcccggagccccgcgggggccgagccgccctctgcagcggccccctccggtcgagagatggagaataaagaaaccctcaaaggattgcacaagatggatgaccgcccagaggagcgaatgatcagggagaagctcaaggcgacctgtatgcctgcctggaagcacgagtggttagaaaggaggaacaggagaggccctgtggtggtgaaaccaatccctattaaaggagatggatctgaaatgagtaacttggcagctgagctccaaggagagggccaggcaggctctgctgcaccagctcccaagggccgacgaagcccgtctcctggaagctccccatcagggcgctcagggaagccggaatccccaggagtgagacggaaacgagtgtccccagtgcctttccagagtggcagaatcacaccacctcgaagagccccgtcgccagatggcttctcaccgtacagcccagaggagacgagccgccgtgtgaacaaagtgatgagggccaggctgtacctcctgcagcagataggacccaactctttcctgattggaggagacagtccagacaataaataccgcgtgtttattgggccacagaactgcagctgtgggcgtgggacattctgcattcacctcttgtttgtcatgctccgggtgttccagctagaaccctccgaccccatgctatggagaaaaactttaaaaaattttgaggttgagagtttgttccagaaataccacagtaggcgtagctcaagaatcaaagctccatctcggaacaccatccagaagtttgtctcacgcatgtcaaactgtcacacattgtcatcgtctagcacatccacatctagttcagaaaacagcatcaaggatgaagaggagcagatgtgtcccatctgcttgttgggcatgctggatgaggagagcctgactgtgtgtgaagacggctgcaggaacaagctgcaccaccactgcatgtcaatctgggcagaagaatgtagaagaaatagagaaccgttaatatgtcccctttgtagatctaagtggagatcccatgacttctacagccatgagttatcaagccctgtggattcccctacctccctgcgaggtgtacagcagccctcctccccgcaacagcctgtggccggatcacagcggaggaatcaggaaagcaattttaaccttactcattatggaacccagcagattcctcccgcttacaaagatttagccgagccatggattcaggcattcggaatggagctcgttggctgcttattctctagaaactggaacgtaagggagatggcccttaggcgcctttcccacgatgttagcggggccctgttgttggcgaacggggagagcactggaacttctggaggcggcagcggaggcagcctaagtgctggcgccgccagtgggtcttcccagcccagcatctcaggggacgtggtggaggcgttctgcagcgtcctgtctatcgtgtgcgctgaccctgtctacaaagtgtacgttgctgctttaaaaacactgagagccatgctggtatacactccttgccacagcctggcagaaagaatcaaacttcagagacttctccggccagtggtagacaccatcctagtgaagtgcgcagacgccaatagccgcacgagtcagctgtccatatcaacactgttggagctctgcaagggccaagcgggggagttggcagttggacgagaaatacttaaagctggatccatcggtgttggtggcgttgattacgtcttaagttgtattcttggaaaccaagctgaatcaaacaactggcaagaactcctgggtcgcctctgtcttatagacagattgctcttggaaatttctgcggaattttatcctcatattgtcagtaccgatgtctcacaagccgagcctgttgaaatcaggtataagaagctgctgtccctcttagcctttgccttgcaatccattgacaattcccactctatggtcggcaaactctcgcggaggatttatctgagctcagcacgaatggtgaccacagtgccccccctgttttccaagctggtaaccatgctaagtgcttctggatcctcccacttcgccaggatgcgccggcgtctgatggccattgcagacgaggtagaaattgccgaggtcatccagctgggttcggaagacactttggatggccagcaggacagctcgcaggcattggcccctccccgctatccagagagcagctcccttgagcacacagcccatgtagagaaaactggaaaaggattaaaagctacgagactgagtgccagctcagaggacatttctgacagactggctggcgtttctgtaggacttcctagttcagcaacaacagaacaaccaaagccaacagttcaaacaaaaggcagaccccacagtcagtgtttgaactcctctcctttgtctcctcctcagttaatgtttccagcaatatcagccccatgttcatctgccccgtctgtcccagctggctctgtaacagatgcttctaagcatagacctcgggcgtttgttccctgtaaaataccctctgcgtctccccaaacacagcgcaagttttccctacagttccagaggacctgctctgagaaccgagactcagaaaaactctccccagtctttactcagtcgagacccccaccctccagtaacatacacagggcaaaggcatcccgacccgttccgggtagcacaagcaaactaggggatgcctcaaaaaacagcatgacactcgacctgaacagtgcttcccagtgtgatgacagctttggcagtggcagcaacagtggcagcgccgtcatacccagtgaggagacggcattcaccccagcagaggacaagtgcaggttagatgtcaaccccgagctcaactccagtatcgaggaccttcttgaagcatctatgccttcaagtgacacaacagtcactttcaagtccgaagtcgccgtcctctctcctgagaaggccgaaagtgatgacacctacaaagatgacgtcaatcacaatcaaaagtgcaaagagaagatggaggctgaggaagaggaggcgctcgcgattgccatggcaatgtcggcttctcaggacgccctccccatagtccctcagctgcaggtggaaaatggagaggatatcatcatcatccagcaggatacaccagaaaccctaccagggcataccaaagcgaacgagccctacagagaagacaccgagtggctgaaagggcagcagataggcctcggagcattttcttcttgttaccaagcacaggatgtgggcactggaactttaatggctgtgaaacaggtgacctacgtcagaaacacatcttctgagcaggaggaagtggtggaagccttgagggaagagatcaggatgatgagccacctcaaccatccgaacatcatcaggatgctgggggccacgtgcgagaagagcaactacaacctcttcatcgagtggatggcgggagcctccgtggctcacctcttgagtaaatatggagctttcaaggagtcagtggtcattaactacacagagcagttactccgtggcctttcctatctccacgagaaccagatcattcacagagacgtcaaaggggccaatctgctcattgacagcaccggtcagcggctgagaattgcagacttcggtgctgccgccaggttggcatccaaaggaactggtgcaggagagttccagggacagttactggggacaattgcattcatggcgcctgaggtactaagaggtcagcagtacggtaggagctgtgacgtctggagtgttggctgcgccattatagaaatggcctgtgcaaaaccaccctggaacgcagaaaagcactccaatcatcttgctttgatatttaagattgcgagtgcaactactgcaccatccatcccgtcacacctgtccccgggcctgcgagacgtggctctgcgctgtttagaacttcaacctcaggacagacctccgtcaagagagctactgaagcatcctgtcttccgtacaacatggtagtcaactgctcagggtgcgcaacaaggaaagaaaactcgcgggcagccacgttgatagtctgctggcctcataccactgaccagaagaggggccagtggggagcccgcacctaagcatgtgactgacaaatcatgactgcacctgagctccgtctgcagacggctacaactcgtgcaggagctg

SEQ ID NO: 3848 - DNA, 4003 bp, Rattus norvegicus
  Genbank Accession No. NM_053904
agcacattcaccctctgaggcaagtcgccggccttttcagcgttttttgctgttctcccagggttaccagctgaagagccattcctggactccagcttcaacgtcatgggcagcccagaagggcgcttccatttcgccatcgaccgcggtggcaccttcacagatgtctttgcccagtgccctggagggcatgtgcgtgtcctgaagctgctctcagaggaccctgccaactatccagatgcacccacagagggcatccgccgaattctagagcaggaggagggtgtgctgctgcctcgaggccgaccgctagacaccagtcgcattgccagcatccgcatgggtaccacggtggccaccaatgcactgttggaacgacagggagaacgggtggcactgctggtgactcggggtttccgagacctgctgcatattggcactcaggcccgcccggacctctttgacttggctgtgcccatgccagaggttctgtatgaggaagtgctggaggtagatgagcgagtggtgctgtatcgcggagaaccaggtgccggctctcctgtcaaaggccgcacaggggacctgctagagatacagcagcctgtggacctggaagccctgcgtgggaagctggaggggctcttgtctcggggcattcacagtctggcagtggtgctcatgcattcgtacacgtgggcccagcatgagcagcaggtgggcacgctggcccgggagctgggcttcacgcacgtctccttgtcctcggaagtcatgcccatggtacgaattgttcctcggggccatacagcctgtgctgacgcttaccttactcccaccatccagcgctatgtgcagggcttccgccgaggcttccagggccagctaaagaatgtgcaagttctcttcatgcgctctgatggtggcctcgcacccatggatgctttcagtggttcccgggctgtgctctctggccctgctgggggtgtggttggctactcagctaccacctaccatctggaaggcggtcagcctgtcattggctttgacatgggaggcacatccacagacgtgagccgctatgctggagaatttgagcatgtctttgaggctagcacagcaggcgttacccttcaggcaccccagttggacatcaacacagtggcagctggcgggggttcccgcctcttcttcagatctggcctctttgtggttggtccagagtcagcaggtgcccacccaggtcctgcctgctaccgtaaagggggtcctgtgacagtgacagatgctaatctggtcctgggtcgcctgctgcctgcctccttcccctgcatttttgggccaggagaagaccagccactgtctcctgaggcttcccgaaaggctctagaggctgtggccatggaggtcaacagtttcttgaccaatggaccgtgcccagcttcccaactaagtctggaagaggtggccatggggtttgtgcgtgttgccaatgaagccatgtgccggcctatccgtgccctcacacaggcacgaggccatgacccctcagcccatgtattggcttgctttggaggagctggtgggcaacacgcttgtgccattgcccgggccctggggatggatactgtgcacattcacaggcacagcgggctgctgtcagcactaggactggccttggcagatgtggttcacgaagcacaggagccctgttccctgtcttacacacctgaaacctttgcacaactggaccagagactgagccgcctggaggagcagtgtgtggatgccttgcaggtccagggcttccctaggtctcagatcagcaccgagagcttcctgcatcttcgctaccaaggcactgactgcgccctaatggtgtctgcccatcagcatccggccacagcctgctcaccccgagctggtgactttggagccgcatttgtggagaggtacatgagagagtttggcttcattatccccgagcggccggtggtggtagatgatgtacgtgtgaggggaactggccgtagtggacttcagctggaggacacccccaaaatccagactggacctccccacgtggaaaaggtgacccagtgctactttgaagggggttatcaggagactcccgtgtaccttttaggagaactaggctacgggcaccagctccaagggccctgccttatcatcgacaacaacagcaccatccttgtagaaccgggttgccaagcagaggtgactgatacaggggacatccgcatttctgtgggagctgagggtcctagtatggcagataccaggcttgaccccatccagctgtctattttctcacaccgcttcatgagcattgctgagcagatgggccgcatcctacagcgcacagccatctctaccaacatcaaggaacgcctcgacttctcctgtgccctctttgggccagatgggggcctcgtctccaatgctccccacattcctgtgcacctgggtgccatgcaagagactgtacagttccagattcagcacttaggagccgacctccatcctggtgatgtgttgctcagcaaccatcccagcgcagggggcagccatcttcctgacctgactgtcattacaccggtgttttggccaggccagacgaggcctgtgttctacgtggctagccgagggcaccacgcagacattggaggaatcacaccgggctctatgccgcctcactccaccacgctgcaacaggagggtgccgtttttctgtccttcaaactggtccagggaggcgtcttccaggaagaggcagtgacagaggccctacgggcaccaggcaagatctctggctgtagtggaaccaggaacctgcatgacaacctgtcggatcttcgtgcccaggtggcagctaaccagaaaggcatccagctggtgggagagctgatcggacagtatggcttagatgtggtgcaggcctatatgggccatattcaggcgaatgctgagctagcagtgagagacatgctccgggcttttggaacttcccggcaggccaggggcctgcccctggaggtgtctgcagaggatcacatggatgatggctctcccatctgtctgcgtgttcagatcaacctgagtcagggcagtgcggtatttgactttactggttccgggtctgaggtgtttggcaatctcaatgccccgagagccataacactgtctgctctcatctattgcttacgctgtctagtgggccgtgacatcccacttaaccagggttgcctggctcctgtgcgtgtcataattcccaaaggctccatattggatccatccccagaggcagcagtggtcggcggcaacgtgctcacatctcagcgagtagtggatgtcattctgggggcttttggggcctgttcagcctcccagggctgcatgaacaatgtgaccctgggcaatgcccgtatgggctactatgagacagtggctggtggtgccggtgcgggccctggctggcatgggcgcagtggtgtacacagtcacatgaccaacacacgcattacggatccagagattctggagagtcggtatccagttatcctgcgccgctttgagctgaggccaggctccgggggccgaggtcgcttccggggaggtgatggcgtagtccgagagctggtctttcgggaagaggcgctgttgtctgtgctcaccgagcgccgggccttccagccttacggcctccacgggggagagcctggtgcgcgtggcttaaacctcctgatcagaaaagatgggcgcacagtgaatttgggcggcaagacatctgtgaccgtgtaccccggggacgtgttctgcctccacacgcctgggggtgggggctacggagacccggaggatccagcgccaccaccaggctcgcccccgctatttccagccttccccgagcgcggcagtgtattcgagtaccgccgcgcccaggaagccgtatgagtgccccacaataaagatcctttgaatcgca

SEQ ID NO: 3849 - DNA, 1428 bp, Rattus norvegicus
  Genbank Accession No. NM_053906
ctgtttctgctacttgctctttgtttcaaactgccttggagagtttctcacagtaccgtgtgcttcttgctaacttccggtttaagctttagtcgttctctagtctcttcagttttcaccctgagcctcgacactggactactgaaatcgtgtagtgaacgttggatgtgtcccaaaaaggtaatgtggaacacagccgtgcactcggaattcatacatgatcacgtggattacggctttcaaaactgcaagagtaaattcaattggcatgtcatcaaggagaagcgggatgcttacgtgagccgcctgaacaacatctaccaaaacaatttaaccaagtcccacatcgaagtcatccacggctacgcaacatttcgagatggtccccagcccacagcggaagtcaacgggaagaagttcactgctccgcacatcctgatcgccacgggtggtgtgcccacggttcctcatgagaaccagatcccaggtgccagcctggggataaccagtgatgggttctttcagctggaagacttgcccagccgcagcgttattgtgggtgccggttacattgccgtggagattgcgggcatcctctccgccctgggctccaagacgtctcttatgatcaggcatgataaggtgcttagaagctttgattcactcatcagttccaactgcaccgaggagctggagaacgctggcggtgttgaggttctcacagttaagaagttctcacaggttaaggaagtaaagaagacctcatcgggcttggaactccatgtggttactgcacttcccggtaggaaacccaccgtgaccacgattccagatgtcgattgcctgctctgggccattggacgggacccaaactctaagggcctgaatctaaataaactggggatacagactgatgacaaaggccatatcctagtggacgagttccagaataccaatgtcaaaggcgtctatgccgtgggcgatgtctgtgggaaagcacttctcaccccagttgcgatcgctgctggccggaaactcgcccatagactttttgagggcaaagaagattccaggttggactatgacaacatccctaccgtggtcttcagccacccgcctatcgggacagtggggctcactgaagatgaagccgtccataagtatggcaaagacaatgtgaaaatctactcgaccgccttcaccccgatgtatcacgctgtgaccacgaggaagacgaaatgcgtgatgaagatggtttgtgccaacaaagaggagaaggtggttggcatccatatgcaggggattggctgcgatgagatgcttcagggcttcgctgtagcagtgaaaatgggggccaccaaggccgacttcgacaatagggtcgccattcatcctacctcttcagaggagctggtcacacttcgttga

SEQ ID NO: 3850 - DNA, 1417 bp, Rattus norvegicus
  Genbank Accession No. NM_053907
cacgggcatcaagaccagaggactccctaaaggctaactcattgtcttcatttccttggtgattgaaaacgcgtgatggtgagttcctcagagaagtgaaagtggcccagagggatccagtaattcctgttatcggccagctttataagtcagcgagccaggcgcctgtcttcatccggcctgaagtcccaagagtgcaaagatgtccctgtacccagcttccccatacctggcctccctgctactcttcatccttgcccttcatggtgccctgtccctgaggctctgctccttcaatgtgaggtcctttggagagagcaagaaggaaaaccacaatgccatggatatcattgtgaagatcatcaaacgctgcgacctcatactgctgatggaaatcaaggacagcaacaacaacatctgtcccatgctgatggagaagctgaatggaaactcacgaagaagcacgacatacaactacgtgattagctctcggcttggaagaaacacatataaagaacagtatgccttcctctacaaggagaagctggtgtctgtgaaggcaaaatacctctaccatgactatcaggatggagacacagacgtgttttccagggagccctttgtggtttggttccaggcgcccttcactgctgccaaggacttcgtgattgtccccttgcacacaactcctgaaacctccgttaaagagatagatgagctggctgacgtctacacggatgtgagaagacgatggaaggcagagaatttcatcttcatgggtgatttcaatgctggctgcagctacgtccccaagaaggcctggaagaacatccgtttgaggacagaccccaactttgtttggctgattggggaccaagaggacaccacggtcaagaagagcaccagctgtgcctatgacaggattgtgcttcgcggacaagagatagtcaactctgtggttccccgctccagtggcgtctttgactttcagaaagcttatgagttgtctgaagaggaggccctggatgtcagtgaccactttccagttgagtttaagctacagagttcaagagccttcaccaacagccgaaaatctgtttctctaaagaaaaagaaaaaaggcagtcgctcctaggtctcatgttgccattttcttttcttaaagtcgtcccttgcttccagataaaatggccctcgtgggtctcagctctctgcacactcaggaattaagactggctaagctgttttcactgtccactctggttaattttgcctggagccaagttgggaggagagccttctgttacatcaccctgaccacgggcaccctgcgaaccaccatgggtaacctgaagagacacaaagtctattccataataaatgcgtgtatttattacaccataaaaaaaaaaaaaaa

SEQ ID NO: 3851 - DNA, 2176 bp, Rattus norvegicus
  Genbank Accession No. NM_053908
gaattcggcacgagaggggcttggctcaaagtgccattggtttgacaggctggatgaggaggaagtggccgaaaccgaaatattcttcctgaaggtctggatccccgaacagctgtgccactcgattggccccgcccctgtcgccctttgcctgtgacttcccccactcctccagggagatgctgtcccgcgggtggtttcaccgggacctcagtgggcctgatgccgagaccctgctcaagggccggggagtccctgggagcttcctggctcggcccagtcgcaagaaccagggtgacttctccctctcagtcagggtggatgaccaggtgactcatattcggatccagaactcaggggacttctatgacctgtatggaggggagaagtttgcgacgtcgacagagctggtggagtattacactcagcagcagggcatcctgcaggaccgagacggcaccatcatccacctcaagtacccactgaactgctcggaccccaccagcgagaggtggtatcatggtcacatgtctggagggcaggcagagtcactgctgcaggccaagggcgagccctggacatttcttgtgcgtgagagtctcagccaacctggtgattttgtgctctctgtgctcaatgaccagcccaaggctgccccgggttccccgctcagggtcacgcacatcaaggttatgtgtgagggtggacgatacactgtgggtggctcagagacattcgacagcctcacagacctggtggagcacttcaagaagacggggattgaggaggcctcaggtgcctttgtctacctgaggcagccttactatgccactcgggtaaatgcagcagacattgagaaccgggtcttggaactgaacaagaagcaggagtcagaggacacagccaaggccggcttctgggaggagtttgagagtctgcaaaagcaagaggcaaagaacttgcaccagcgtctggaagggcagcggccggagaacaagagcaagaaccgctacaagaacattcttccctttgaccacagccgagtgatcctgcagggacgtgacagtaacatcccagggtctgattacatcaatgccaactacgttaagaaccagctgctaggtccggatgagaactctaagacctacatcgccagtcagggctgtctggacgctaccgtcaatgacttctggcagatggcttggcaggagaacactcgtgtcatcgtcatgactaccagagaggtggagaaaggccggaacaaatgtgtcccatactggcctgaggtgggcactcagcgcgtctatgggctctactctgtgaccaactgtaaagagcatgacacagcagagtacaaacttcgaacattgcagatctccccactggacaatggggacctggttcgggagatatggcactaccagtacctgagctggcctgaccatggggttcccagtgagcctggaggtgtcctcagctttctggatcagatcaaccagcggcaggaaagtttgcctcacgcggggcccatcattgtgcattgcagcgctggcatcggccgcaccggcaccatcatcgtcattgatatgctcatggagagcgtctccaccaaggggctagactgtgacattgacatccagaagaccatccagatggtacgggcacagcgctctggcatggtgcagacagaggcacagtacaagtttatttatgtggccatcgcccagttcatcgaaacaaccaagaagaaactggagatcatacaatcccagaggggccaggagtcggagtatgggaacatcacctaccctccggctttgaggagtgcccacgccaaagcctcccgtacctcgtccaaacacaaggaggaggtgtacgaaaacgtgcatagcaagaacaagaaggaagagaaagtaaagaagcagcgatcggcagacaaggagaagaacaaaggttctctcaagaggaacatcagccttactccgtgcagaggcctccgctgggcagacagagacctgtagtccacaccacccccatcttgttgtaatttaagtgaccgtggtcctctgaacctgtatatggctcagcaagcctcagggagagtcagacccttctcttcttgtaaataaagcccctggacaactgtgtaaaaaaaaaaaaaaaaaaaaaactcgag

SEQ ID NO: 3852 - DNA, 5990 bp, Rattus norvegicus
  Genbank Accession No. NM_053923
gaggaagcaaagaccgggcaaaacacatgaaggaaaatttggaacttcttttataatatcaacaagacatttggggccaaataaatcctctccgttacacaaaaccaaaaatggcatacaattggcaaacagagccaaaccgtgctgaaccacaggaaggtggacatgatcaccagcagtgtcaccatgcagaccagcacctttcttccaggcaagtcaggttgggttttgatcagcttgtggaagagctcagtaacaaaactccactgcctgaggatgaaaaagaaggcacgtgttttgtaccagatacaccaaacttggattcaaaatggcaatccatatatggaccccacccaaggcacttcaatgaattcacttctcagagtccccacttctcccagcttccttttggaaaagcatcagccattggttttaatcctgctgtattacctgcacatcagttcattcatgagggagcctcctggagaaatcccacaagaaaatatcatggtggtgaggatcccaggttcagtgctctaactccgtcatccactggcttggataaatgtcatcaacaaggacaatcagggaccgaacattgtaactattatgtggaacctgaaaacaatgttccccatcattattcaccctactcaatggactccatacccgatagtgaggaaaaaggaagtggagatgcggatcttgtagaaccttctctggtgttctctaaagactcctttctacccagggcatcggagaacatgtcagtggaaagcacagagcccattggttgcccccttgaaatagttgaagcaccccaagggagtaacaagagcctcgcctccttttgcaacaatgtaacaaaaataagaggactatatcatgcaagtgacactaattccaattccggaaagatctgggccatcaccacagcctatccatctcggctcttcgctgacacccagttcagagttaaaatttccactgataactcggcacaacttcttcttcttaagccacccgctaattatcttgtcaaagacctaattgccgaaattctacttttatgtgcaaatgagcagctttcccccaaagagtatcttctaagtatatgcggttctgaggaatttttacagacggatcactgtctagggagccacaaaatatttcagaaaagtaaatctgtcattcaactccatctccagagaagcagggacactccaggaaaattatcccggaagagggatgatgaccgcagtcgggtccatctgaaccaacttctagaatttacacatatttggaaaatatccagacaatgcctctccacagtaatgaaaagctacaacctccatgtcgagcacctgttgaaaacccaggaagatgtggaggagaaacctctgtcatccatgttttcctgtggccgacaccctcctcagccacatgggaatgacattattgaagatgttagaaacatatgcagtgttctggggtgtattgaaaccaaacaagtttcagatgcagtaaaagaactaactctaattctgcagagaccatcacagaattttcatcagaattcagagacttcaaaaaaaggcttcatagagaacgtgacatcggaactgtcgaggtccctccatcagctggttgacgtgtactgcagtagcttttgtacagatttccggcctgcgcgcgcacctggaggcgtctcccgcgaccacgctgggctccactcccacctgagcttcacggtgtgttccctgcacaatgttccagaaacttgggcacacagctacaaagcattttcattttcctgctggctcacatatgctgggaagaagctgtgccaagtgaaaagctgcagatccctgccagtcacaaagtcattctctttttcggtgaactggaatgaaataatcaattttcctcttgagataaagtcacttccaagagaatccatgctcgttataaagctgtttgggattgacagtgccacccacagcgcaaatctgctggcctggacctgccttccactatttccaaaagaaaagtctccgctggggtctaggcttctcagcatgacactacagagtgagcctcctatagaaatgatggctccaggagtatgggatgggagccagcctaccccactgaccctgcagatagattttccagctgccacgtgggagtacgtgaaacctgagactgaagagaacagaactgaccaccaagagcctccaagagagtgtttaaaacacatcgccagactctcccaaaagcagcctcccttgctactttctgtggaaaagaggagatatttgtggttttatcgtttctactgcaacaatgagaactcctctctccctctggtcttgggcagcgcccctggttgggatgaagggacagtttcggaaatgcatgccgtcttgagaaggtggacattttcccatccgttggaagctcttggccttttgacttccaggtttccagaccaagacattcgtgaagttgccgttcaacagttagacaacttcttgaccgatgagctgctggactgcctcccacagctagttcaggctgtcaagtttgagtggagtctcgaaagtcccttggtggaactcctgcttcatcgatccttgcaaagcatccgagtggctcaccgcctgttctggctgctgcgggatgcacaaggtgaagactactttaaaagctggtaccaggagcttttggccgctctccagttctgtgcaggagaagccctgatcgaagagctttccaaagagcagaaacttgtcaaactcctgggtgatattggagaaaaagtgaagtcggctggcgatgctcagagaaaggatgtgctaaagaaggagattggcagtctagaagaattctttaaagatataaagacttgccatcttcctctgaacccggccctgtgcgtaaaaggaattgatcgggatgcatgttcatatttcacatctaatgccttgccattgaagatcactttcatcaatgctaatccaatgggcaaaaatatcagtgttatttttaaggccggcgacgatcttcggcaggatatgcttgttctgcagattattcaagtgatggacaacgtttggcttcaggagggcctcgatatgcaaatgatcatttatggatgtctagccacaggaaaggctcaaggattcatagagatggtgcctgatgctgtaacgcttgccaagatccatctgcactctgggctgataggacccctgaaagaaaacaccatcaagaagtggttcagtcagcacaaccacttaaaggaagattatgaaaaggccttgaggaactttttttactcttgtgctggctggtgtgtggtgacattcatcttgggagtctgtgaccgacataatgacaatatcatgctgacaaagtcaggccacatgtttcatattgactttggaaaattcttgggtcacgcacaaacatttggcggtataaaaagggaccgagcgcctttcatttttacttcagagatggagtactttattacggagggtgggaaaaacacacagcattttcaagacttcgtggaactctgctgcagagcctacaacattgtgaggaagcacagccaactgctcctgagccttctagaaatgatgctgcatgccgggcttcctgagctgagggggattgaagacctgaaatacgtacacgacaatctccggccacaagacacagacctggaagccacaagtcattttaccacgaagataaagcagagtctggagtgcttcccagttaaactgaataacctgatccacacgcttgcacagatgccagccttcagccttgccagacctgcccctcagactcctccccaggagtgctgcgtcctgaataaaaccaggacaattcagagagtcacaattttagggttcagcaagacacacagcaacctgtacctgatcgaggtgacacgcagcgacaacaggaaaaacctggccaaaaagtccttcgagcagttttacagacttcacagccagattcagaagcagttccccttgttgactctcccagagtttcctcactggtggcatctacctttcacagactcgcaccatgagagaatccgagatctgagtcactacgtggaacaggtgctgcacggatcttacgaagtcgcaaacagtgattgtgtactcagtttttttctctctgaacatatacaacagacccttgaagactctccatttgtggacccaggtgaccattctccagacaagagcccccaggtgcagttgctgatgacctatgaggacacaaagctcaccatcctagtgaaacacttgaaaaacatccatctcccagatggctcagcgcccagcgcacatgttgaaatttatcttctgccacatcccagtgaagttcgcaggaagaaaacaaagtgcgttccaaaatgcactgacccaacttacaatgaaattgtggtatatgatgacgtctcaggacttcagggacatgttttaatgctcattgtgaagagcaaaactgtatttgtgggagcggttaacattcagctctgcagtgttcccctcaatgaagaaaagtggtacccattagggaacagtatcatctgaccaatgccatgaatgtatgcattattgattaagtacttgtgtgttttcagcttccatttcccctatagcatacacaaggcatctttcttgcggaagatggcttggagcagtggttctcactcagcgtccctaacactgcgaccctttaatacaattcctggtgattgtagtgacccaaaccacaaaattattttagttgctatttcacaactgtaattttgacacggttatgaattgcaatgtatatatctgatctacaggatacctactattcgacccctgtgataaaagggtcattggacaatcccaaagggtcatgactcatgggttgagaaccacaggcttagagtggtcacagaagaagcagatcaaaatcagtcttttgtagctctttcttctctaccttctccttattttcttatcatattttctccttggaatattcatcatggaaaatcccatatgcaaagtcatgaaagaatgattcatttaatatgcatttttgaatcaaactaagttcatgtcttgccttaattgcttgttgaggtcaaaattatacttttagggtgttttctaaagctaggagaagctcatgtaagggttaagaatatttgcaatatatttcaaaagttaaatatgtgtacaagccacatatctagtcatgattgaatttattgagagaattggtgatctccaaccatgtgctataatttttctatcaaaaaaaaatccctaagatttttctattgcatagattttttttctttaagaatttcatgcatgtatatagtgctttcgttattgtagcttctctcttttttagttgtccccacacccatcaacaactgttcttctctaaaactcctgtattcctgtggggagttttatttttaagatgggcatcaaactatatatcccagctgacctagagcttgctatgttgaccaggtgggccccaaatcacagtggtcctcctgcctctgtttcccgaccgctaaggttccaggtcattggatcttgtctgtaatttttaagttcagttcttagaatttgatattgatcaatccagtgtcattgtgtcttccagcctcggtcatgttcacaccttaaatcttattaatctccaaacccaaaatatccaacttttaagttcaccatttaaaacgcctctttgcgtgttaaatactctcactgcacttgaaccaacaccttgtgttcgcacggaccagatagatgatctcacagtttgtcacctgtgtaacaggcaaacccagaggacgcctccaagataatcaaactggaggtttcaaaaataaaacatctgccataaaaaaaaaaaaaaaaaaaaaaaaaaaaaaaaaa

SEQ ID NO: 3853 - DNA, 1219 bp, Rattus norvegicus
  Genbank Accession No. NM_053946
aattgaggaggtcagaaggtttcgcccggtcgccgagagagacaagcgaacatggcctcgccgaggtggctctggtgtgtgtgtgcgaccgcagcggtcacactgctgctcgtttccaaggttccttcggcctctgcccaaagaaagaaggagaaggttttagtggagaaggtcattcagctgatggaatggaccaatcaaagaccagtcataagaatgaatggagacaagttccgtccccttgttaaagcaccaccaagaaattactctgttattgtcatgtttactgctctccaacttcatagacaatgtgtcgtttgcaagcaagctgatgaagaattccagattttggcaaatttttggcgatactccagtgcatttaccaaccgcatattttttgccatggtggattttgatgaaggctctgatgtatttcaaatgctaaacatgaattcagctccaactttcatcaactttcctccaaaaggaaaacccaaaagggctgatacatatgagttgcaggtgcgagggttttcagctgaacagattgcccggtggatcgcagacagaactgacgtcaacattagagtaatcagacctccaaattatgctggacctctaatgttggggttgcttcttgctgttattggtggacttgtgtatctgcgacgaagtaatatggaattcctctttaataaaaccggatgggcttttgcagcattgtgttttgtacttgcaatgacatctggccaaatgtggaaccatataagaggaccaccatatgctcataagaatccccatacaggacatgtgaattatatccacggaagcagccaagcacagtttgtagctgaaacccacattgttcttctcttcaatggtggggttaccttaggtatggtgcttttatgtgaagctgctgcctctgacatggatattgggaagcgaaggatgatgtgtattgctgggattggacttgttgtgttattcttcagttggatgctgtccatctttcgatcaaaataccatggctatccatacagctttctgatgagttaaagaggattccagagaaacattgacaccggtaatggaaactgaaaaataaaacctgttgggggttggagaatgcactcaagttttttcttaccccttgggcaaggaacgacttataacaattaccaagtccggggccttaaagaaaggaacagaggtttgg

SEQ ID NO: 3854 - DNA, 864 bp, Rattus norvegicus
  Genbank Accession No. NM_053948
tgacttctgctagtgcttccggcgaggtcccttcctggggagttctggcctctgcggtccaagcttctgcagaagatgttttatcatatttccctggagcacgagatcctactgcacccacgctactttggtcccaacttgctcaacacggtgaagcagaagctgttcaccgaggtggaggggacctgcactgggaaatatggctttgtgattgctgtcactaccatcgacaatattggtgctggtgtgatccagccgggccgaggttttgttctttatccagtgaaatacaaagctattgttttccggccctttaaaggggaagtggtggatgctgtggtcactcaggtcaacaaggttggacttttcacagaaattgggcccatgtcctgcttcatctctcgacactccatcccttcagagatggagtttgatccaaattcgaaccccccttgttacaagaccatggatgaggacattgtaattcagcaggacgatgagatacgcttgaagattgtagggacacgtgtagacaagaatgacatttttgctattggctctctgatggatgactacttgggacttgtgagctgagtgagggagcctccagcttgctttgatcctgatttagaaagtgtgactttccaacttgaactcagcaccaacttgactgtcgtaccagaggttcaatctggccactgttatgggggcagggaagaaggctccttgtccccagaacactttgtttcttccagctgagctgtgctcttattctcttctgtgttctaaccataaacatgttgtccttagttctcaaggaaatgtgtcttctcttggtaggaataaaagttgtttatttatttt

SEQ ID NO: 3855 - DNA, 4529 bp, Rattus norvegicus
  Genbank Accession No. NM_053961
aagcttcttgatttcacttttcttcagtcacaaacttgaggatggagctttaagagtatacacatggcctactattcggctatcacccaggcccagcttaggctctttttaaaaaaaagtcatttttttttaagatttatttattttatgtctatgagtacactgtagctgtcttcagacacaccagaagagggcatcagatctcattacagatggttgtgagccaccatgtggttgctgggaattgaactcaggacctctggaagagtagttgggtgctcttaaccgctgagccatctctccagccccccctttttttaaaaatatatttattgtatatatgtgagcacactgttaccatattcagacacaccagaagagggcatctgatcccttacagatggtcgtgagccaccatgtggatgctggggattgaactcaggacctctggaagagcaaccagtgttcttaaccactgaaccatctctccagtccatctgtatggctttcttttttttggttctttttttttttttcggagctggggaccaaacccagggccttgcgcttcctaggcaagcgctctaccactgagctaaatccccaaccccctgtatggctttcttaattgccagattttaacttcttctctcacctcctctaactactgcaatagatactcaactgcgctcagcctcagtcttctcccttctgatgcattctcttcattcattatccttttttatagtgagaaaaggttgctctataaagtccaggctgacctgagactaaattggccgtgctggcttcccattcacagagacccaccggcctcagctgagtgctggggtcaaaggctctagccatcatgcccagctgcaatgtcttttcttaaagggacatcaggcccgctggattggggcctgcctgtaggaggtcacttagctttaattatttctctaattactacaattatctctctaaatgcaattgtagtgcatctgaggcacgtgatttaatctgtgttatcccaaagtcctcttcaggtttcctcaggtctccagtgctctccttcccaggaaggcttggaactaaagccacatcatggtttttttgttttttttttctttttttcggagctgagctggggaccgaacccagggccttgcacttcctaggcaagcgctctaccactgagctaaatccccaaccccccacatcatgtttacgtgatgttttcatccacgaatctgagaaaacgctccacttaaagcctctggtggctgtaaaccccttgagactagtgagtctttatcttaccctcctgagtttgcctttacatagcttcatagagctcagcatgcttaaccatatcctgtttcccgttgcttcacaaatgttccctacctttcaaagtcatggctccccaactacctgggtacctcgatgacacgagtaagcaggactgactcgtaatacaggatcttcaaaggtggaaagccatgagatgggagtgaagattttaacacttaactgggtagatgggagccctggagaccacactcacaactcaaaaaggtaaggaggacatacaggtcttttttgggacatagccatgtgacactgtgacagaatgaccagtgtgtcatacttgcacagcctgtgtagaggtcaaggtcagtatggctggtcaaatggagggcagctagctgcctattagaggggcggtcattaggcgacaactgtaaaaagcacagctgaaggactgatcgctcctagggatggtggaggaggaattttattgtagataaaagggagagagcatagtcagagcaaagacggctgggagagtcagaggggcagcctgggttaagacactgacgaagagagtgccatagctaaaatggctggattatataaggaaaggcagctggacgaagggcagtccagaccttgggttggggaagtttagggtggggagcagggcatgcctgccataccctgaaggattctgggaaaacctcatggccaggtccactttgatgttagtcacctcagtttgtcccagggtttcagacttaacagtaataagaaagatagaaagtgcccgacataatccagctttggtttcatgattctacaggtgtgtgtgtgtgtgtgtgtgtgtgtgtgtgtgtgtgtgtgtgtgtgggtgtgtgtgtgcgtgcatatagaggtcactgattaagctcaatttggtgatcttcctcgcttccccagtactggcaagaattccacacccagctttttatgttttgtttttgtcattttgagacccaggttgactctgaagggcctagacctcactctgtagaccaggttggccttgaactcaggttcaccagccttggacttaggagtggtaagatgtgcttttcccttgggtgctgaggatgggacttatatgtgatgtgtacgagtcctggaacagggtatgtggatcagattttgatcagcctgccagttttccagtgagcactgggattgaaggcctgtgctgcctcacacagcctgctagctatgatccctgtgtcttctccagtgaggaattcattccttcgagcctttatcactgtgctgacttcccacgggaacaatcatcacgtggcatgagctactccctgaaaacggaacagcccagcctggtcttgtcaccctcctgccttgtgctgaaattaggcctgtaggcctgtgccacctactatacctgaccaaaagtagaatggcgaataggccttttcccaaccttctggggcaggggtggccccattgcctaagtgccccgcgggcctgtccagcgctgcaccctgtgacctacaagggcttggcagcgactaccagtgacaaacagctgactaaccgggggaagcgacgggtctcaacggacctcatgacagcccagcgcagagaaggcagggacgccgccacgtcttgttccaaggcgagagagggcaacgagggaattgttgaggctgcgcctcgcgcctctcctcacgcgagaacgccgcgaaacccagcctagacgagtggcacggagtgcgcgtgcgcgacagtcccacttcgcaggcccttccgtcacgtggccccagcccacctccccccacctcccccccaccgtgcccccgcttctctcactacacatgcgcagccgcccctctctgccccgcccctctgcggccggtctcttccaccctagaggccgcctgagcctctccgagtggccacgtgcgctcatgcgcgccggcgggacggccctcccagtgacgtgaccgcccactcggagcgctcctgctgtagcttgcccatctcccgctcccacaatccggcgtgatggctgccgccgttcctggcgccgtttcgctctccccactgctgtccgttctccttggcctgctgctcctctctgctcctcatggcgccagcggcctgcacacgaagggcgcccttcccttggacacagtcactttctacaaggtcattcccaaaagcaagttcgtcttggtgaagttcgacacccagtacccctatggagagaagcaagatgagtttaagcgtctggctgagaactcagcctccagcgatgatctcttggtggcagaggtggggatctcagactatggtgacaagctgaacatggagctgagtgagaagtacaagctggacaaagagagctacccagtcttctacctcttccgggatggggactttgagaatcctgtcccatacagcggggcagttaaagttggagccatccagcgctggctcaaggggcagggagtctatctgggcatgcctggatgtctgcctgcgtacgatgccctggcgggccagttcatcgaggcctccagcagagaggcccgccaggccatcctgaaacaggggcaggatggcctctcaggtgtgaaggagacagacaagaagtgggccagtcagtacctgaagatcatggggaagatcttggaccaaggtgaagacttcccggcctccgagctggcccggatcagtaagctcattgagaacaagatgagtgagggtaagaaggaagagctgcagaggagcctcaacatcctcaccgccttccgcaagaaaggcgccgagaaggaggagctgtgagggcaccaggctgctagggtttgctgagggcggggagggagagccgcctgctgactgtggggccctgtgggtggagggggcagtggagcaaagcagtcctgagccagagacctgtgccccgagtgcctggacactgaggctgctgagaccataccctggacatccttggagcagtttgtggggagcctgtgtgccaagacaagatggctgtgtcccacaggagctggtactatagaggaaggtccttgacaggtatagttctgatcaaataaaagtctgttttggttagatgattttcttctcagatagtactttttggcccctgtcaagagtctgagctgttgtgcattctattctgccaagacttgcctgcgtaa

SEQ ID NO: 3856 - DNA, 1444 bp, Rattus norvegicus
  Genbank Accession No. NM_053962
ccctctagatcaggacgtcgccggggtggctgtgacttggccaagtgctcgcatgagtcaaatgacaaggaagagacttctgccgtggaacccatgccgcaccggccacctttgccaagaccgcctgtgcctttttctctcgcaggtgcggcggggcatacctgtgatcccagcaattgggagactgagacaggaggatccaaccttcaaagctacatgccatggctgcccaggagtccctgcacgtgaagaccccactacgtgacacgatggcattgtccaaagtggccggcactagtgtgttccttaagatggacagctctcagccctctggctccttcaagatccgaggcattgggcatctctgcaagatgaaggcaaaacaaggctgtaaacatttcgtctgctcttcagtcgtccagatttggggttccagaatgaggggcagaagtcactctggagatgagcagccccacgtgaggtcccaggccctccttcctgatacaccctctccactgacagcgggcaacgcgggcatggcgactgcctatgctgccaggaggctgggcctcccagccactattgttgtgccaagcaccacacctgccctcaccattgagcggctgaagaacgaaggggccacagttgaagtggtgggagagatgctggatgaggccatccaactggccaaggctctggaaaagaacaaccaaggttgggtgtacatctcccccttcgatgaccctctcatctgggaaggccacacttcccttgtgaaggagctgaaggagacactgagcgccaagcccggggccattgtgctgtctgtgggcggtggaggcctgctgtgcggagtggtccaggggctgcgggaggtgggctgggaggatgtgcccatcatcgccatggagaccttcggcgcccacagcttccacgctgccgtcaaggaaggaaagctggtcaccctgcccaagatcaccagtgttgccaaggccttgggtgtgaacactgtgggggcacagaccctgaagctgttttacgaacaccccattttctctgaggtcatctcagaccaggaggctgtgactgctatcgagaagttcgtagacgatgagaagatcctggtggagcccgcgtgtggcgctgccctggctgcagtgtacagcggtgtggtgtgcaggctgcaggctgagggccgactgcaaaccccactggcctcgctggttgtcattgtgtgtggtggcagcaacatcagcctggcacagctgcaggcactcaaggcacagctgggcctgaatgagctactcaagtgatatctgctgctgccctggccaccctgaggggtcaccagcacccctgagtaggctgggtgggcgtccgcctgacagtggcccaccctcctttatccatgtttataatatgcactttttcattgtaaataaaa

SEQ ID NO: 3857 - DNA, 1231 bp, Rattus norvegicus
  Genbank Accession No. NM_053965
acagcgacgaagatcaagactgccaggagctgcaagtagactgacagaagactgaccatggcagaggagccgaaacccatcagtccgcttaagaacctccttgccggcggctttggcggcgtgtgcctggtgtttgtggggcaccccttggacacggtcaaggtccgactgcagacacaaccaccaagtttgcctgggcagccacctatgtactctgggaccatcgactgtttccggaagactctttttagagagggcatcacagggctgtatcggggcatggctgcacccatcattggagtcacccctatgtttgcggtgtgcttctttgggtttggtttgggaaagagactacagcagaaatctccagaggatgaacttacctacccgcagctgtttacagctgggatgttatctggtgtgttcaccacaggaatcatgacccctggagaacggatcaaatgcttactgcagattcaggcttcttcagggaaaaacaaatacagtggtaccttggactgtgcaaagaagctgtatcaggagtttgggatccgtggcttctacaaagggactgcgctcactctcatgcgagatgttcctgccagtgggatgtatttcatgacatacgaatggcttaaaaatctcttcactccacagggaaagagtgtccatgacctcagtgtgcctcgggtcctggtggctggcggctttcgagggatcttcaattgggttgtggcaatccccccagacgtgctcaagtctcgattccagaccgcacctcctggaaaatatcctaatggtttcagagatgtgttgagagagctgatccgagaagaaggagtcacctccttgtacaaagggttcaatgcagtcatgatccgagccttcccagccaatgctgcctgtttccttggctttgaaattccgatgaagatcctcaattggattgcccccaacttgtgaggctgaagacatgttgaagacctttggatgctggaagactgttgccgagaagcaggggcaggactgggaagaccctgagggtgaggggagggaagtggtgtgatcagagccccaggcatgactgtgatggtgaaactgttgccttaatgacatcctctaccttatgtaacttggtgccattttgaaacttgaatatagaaggtttccagagaattggagatggaataaatagtttatagactcgtcaaaaaaaaaaaaaaaaaaaaaa

SEQ ID NO: 3858 - DNA, 1794 bp, Rattus norvegicus
  Genbank Accession No. NM_053969
gtttaacttgcagggggccgtggaacccatgcagattgatgtagatccgcaggaagatccccagaacgcacctgatgtcaactacgtggtggagaaccccaccctggatctggagcagtatgcagccagctacagtggtctgatgcgtattgagcggctacagtttattgctgaccgctgccctccgttgcgagtggaggccttgaaaatggctctgtccttcgtgcagaggaccttcaatgtggacatgtatgaagagatacaccggaagctctctgaggctaccagggagctgcagaatgcacctgatgccatccctgagagtggagtggagcccccacccctggacacagcctgggtggaggccactcggaagaaggccctgttgaaactggagaagttagacacggacttgaagaactacaagggcaattctatcaaggagagcatcaggcgcggccatgatgacctgggtgaccactacctggactgtggggacctcagcaatgccctcaagtgttattcgcgagcccgagactactgcaccagtgctaagcatgtcatcaacatgtgcctcaatgtcatcaaggtcagtgtctacttgcagaattggtctcatgtgttaagctatgtcagcaaggctgagtctactccagagattgctgagcagcggggagagcgggacagccagactcaagccatcctcaccaagctcaagtgtgctgcaggcttggctgagctggctgcacgaaagtataagcaagctgccaagtgcttccttctggcttcctttgatcactgtgatttcccagagctgctgtcccccagcaatgtggctgtctatggtggcctatgtgccttagccacctttgaccggcaggagctgcaacgcaatgtcatctccagcagctccttcaagttgttcctggagctggagccacaggtcagagacatcatcttcaaattttatgagtccaagtatgcctcatgcttgaagatgttggacgagatgaaggacaacctgctcctggacatgtacctggcccctcacgtcaggacactgtatacccagatccgtaaccgggctctcatccaatacttcagcccctatgtgtcagctgatatgcacaagatggctgctgccttcaacacaacagttgcagctctggaggatgagctcacacaggtcatcctggagggccttattaatgcccgcatcgactcacacagcaagatactgtatgctcgagacgtggatcagcgtagcaccacctttgagaagtccctgctgatgggcaaggagttccaacgacgggccaaagccatgattctgagagcagctgtgctacgcaaccagatccatgtcaagtctcctcctagagaagggagccaaggggagctgactccagcaaacagccagtcacggatgagcaccaacatgtgaaaggcattcccgtgaccttcagactagtctgcacagctcctctgccagtggaagcagcacctgggcctcctgcctgctttcctcaagatgagaccccagactgtgtggttcattagagcagtccagcccctgggatgccagttcattggccttccgcttcggaggccccctctgctgtggtaggcaggctgcccagtatggccattcgggcctgactctaggtttctgtcccaatgaaacagaccatgtgcaattcccaggtaagggttcctcaacccttcctgtccatgtagttctgactgcagcagtgtcactaaccaagtagtccattaaagtacagattgatcatt

SEQ ID NO: 3859 - DNA, 963 bp, Rattus norvegicus
  Genbank Accession No. NM_053971
ctctttcccgtcttgcaagatggcgggtgaaaaggcggagaagcctgataaaaaggagcagaaacctgcagccaagaaggctggcggtgatgctactgcgccccgcgccggggcctggtgcgtcaaaaagagtagttctaaggctaaaaagctgaggaagagtaagccccattgcagccggaaccctgtcctggtgagaggaatcggcaggtattcccgatctgctatgtattccagaaaggccttgtacaaaaggaaatactctgctgccaagacaaaggttgagaagaagaagaagaaagaaaaggtccttgctaccgtcacaaaaacagttggtggggacaagaacggtggcacccgggtggtgaagcttcgaaaaatgcctaggtattaccctactgaagacgtgcctcggaagctgctgagccacggcaagaagcccttcagccagcacgtgaggcggctgcgctccagcatcactcccgggactgtcctgatcatcctcactgggcgccacaggggcaagagagtggttttcctcaagcagctgggcagtggcttgctacttgtgactggacctcttgccctcaacagagttcctctgcgtaggacacaccagaagtttgtcatcgccacctctacgaaagttgatatcagcaaggttaaaattcccaaacacctgactgatgcttacttcaagaagaagccacttcgcaagcccaggcatcaggagggtgagatcttcgacacagagaaggagaaatacgaaattacagagcagcgaaaggctgatcagaaagctgtggactcgcagattttgccaaagatcaaagctgtcccccagctccagggctacctgcggtctcagttctccctgacgaacggcatgtaccctcacaaactggtgttctaattgttaacaacctaattaaactgcttcataaggaaaaaaaaaaaaaaaaa

SEQ ID NO: 3860 - DNA, 1483 bp, Rattus norvegicus
  Genbank Accession No. NM_053978
ccagcatcctcggacaccatgtcagactctgaggaggagagccaggaccggcaactgaaaatcgtcgtgctgggggacggcacctccgggaagacttccttagctacgtgttttgctcaagagacatttgggaaacagtacaagcagactataggactggatttctttttgagaaggattaccttaccaggaaatttgaatgttactcttcaagtttgggatataggagggcagacaataggtggcaagatgttggataaatacatctatggagcacagggaatcctcttggtatatgatattacaaactaccaaagctttgagaatttggaagattggtattctgtggtgaagacagtaagcgaagagtcagaaactcagcccctggttgctttagtaggcaataaaattgacttggagcatatgcgaacagtaaaacctgataaacacttacgattttgccaggaaaatggttttagtagccactttgtttcagccaagacgggagactctgtcttcctgtgttttcagaaagttgcggcagaaatcctgggaatcaagttaaacaaagcagaaatagaacagtcacagagagtggtgaaggcagatattgtaaactacaaccaggagcccatgtcaagaactgttaatccacctcggagctccatgtgtgcagttcagtgagcacacactgtattgatagttctggctgctcttccctggattgggcccaagctgcctaggaacatgttttatcagtgactgtctctgtagtcagctcacacttcctcctgctctgctccttcatcccttagtcgcctcagagtatcgggcagctccctggacaggaaggaattcagatttggaaccacatgttttgaaatctgaatggaaagtccattctctggattgagactgcctcctcgctccagaagaaccatgttgcttctttatctcttcttttttcccagatttaaaaaatttaaacagatatgaagatgctccacgctttgatcatcattttctatttgaacttgtatatgtgaacgtgtacttgagagcactgatggtggaagttatcaagaaggtgttcctttgctggctattaagagtaaactatacaaagctgcatctgattgaaagtgcttcaaatgaggctgcaatagaaatattttttcatttttaaaaggagcctaatgtgtttatattgtagtttataactcacaagtactgagtatttgatattgtatttttattactgtatcatggtcattgcatattttatcatatttggcttagatggctttatgaattttgataaatggttcagctgatcctccacatggaatttctcctacaggctgtatgagagtgcttccagatgagtcatgatatccttggatcattgtggatcgatcacactgtacctgatgttctgatgtttttctcacataaataaatttatttaaattaaaaaaaaaaa

SEQ ID NO: 3861 - DNA, 2717 bp, Rattus norvegicus
  Genbank Accession No. NM_053979
agcctgagcccgggcggctggagggctccgctgcccgaggatgggaattctcttcacccggatctggagactgttcaatcaccaggagcacaaagttattattgttgggctggacaatgccgggaagactaccatcctttaccagttttccatgaatgaagttgtacatacatctcctacaataggaagcaatgtggaagagattgtggttaataatacacgtttcctgatgtgggatattggtggccaagaatcccttcgttcttcctggaacacttattatactaacacagagtttgtaatagttgtggtggacagcacagacagagaaagaatttctgtaactagagaagagctctacaaaatgctagcccacgaggacctaaggaaagctgggttgctgatttttgctaataaacaagatgttaaagaatgcatgacagtagcagaaatctcccagtttttgaagctcacttctataaaagaccaccaatggcatatccaagcatgctgtgctctcactggcgaggggttatgccaaggacttgaatggatgatgtcacggctgaagatcagatgatctcttctgaccccttctcatggactctgtataaacaaagtgctggactttatctgaaagctgcaaaaaatggtttagatatatttataataaactgacttaagagttttctacaagaagaaaattaagaccatttatttgaaaacagatgaaatgtcaccacctcgtttgctctctcattccttccaaacctgtgactggtattttctcatgatgaatcctctccggacatgggagagttctaatgaatacaagggagaggaagacatttgaacttggagctttatttcctcgacgagcccaccctgccccaagtgaatgttcccttttcattacattgaatcaaatacggatcagcacggatactgtttccagtttttaaaaatgtaataatattatggaaagtattttacttaaagttgaatatgtattgtgtatatacctcaagttcaggttaatggctttgatttatttgtgttctaaaggaaagcaaataacacaagttaatgacgttattttcctgatgtcactgagtaccatcttggtgttaattgtcactgtttagtttaccctctgttctctgtattgttctaacaagccaaccccagcccagaatcggtaagctgctccttaaaaatgaaacgggagaaagcttgacattgtgtacctatttttgttgctcagtcatacagatggaaatccataacgcaagtgggtagagtctgctggactcctggcctggtgtggccgggcagaattactcgagaagcagttgtcagactttcccttctgctggtcctaattcagccaattcagctactaatcggtcattcataaattgtgattaaaatgatcaggtaatttttaattgaaaatcatgttgtgaaatatatctacccaaagaggtaacatcctataaatagtaataattaatttagctgcagccttttcaggtattaaattatatgacaaacagttaaaatgaatttaagagtaaacataaggcatagttttcagtgaacattaataatttctcaatttgcagattagcatctgcaaaggtatcttcttccattgcataaaatgccttgtttaatagttaactaatcaaatattctgaatgacttcaaaaatttgattgaaaatttgagatatcacattatttgtactaggatttgacctaaaacaccttttatatttgttaacctttcttaaatttagttaaaatttgaagtatttctgtcgtaattataaacaaaattattttgtgttttaacatattcttggtgactctttatactttttgtgccctgaaaatttgaaggttactccaaactgtcaagatttaggatattcaagaaaagatttaactagttttagtgtcagactttaaaatttcctaaggaatttggtaagaaatagaagtccactctataagcattgaggaaactttgaaaaacctttaagtaaatgtaagactcttaatgactaaacccatcggagtggatgagtgttcccctggaggcttgtgtttgagacctgtgctgtaagcctcccacttgaccttcagcgtaatgtttcccacctgctcagagtgtcagcactcgtcactaggctttccagggctaagtccttcctgttcacatgttctcacactttttcaaatcatgaggctttctcctgtatagtaaaaatccccttaaagactcaaatctacgtcgtagttttgtcagagaccaatagtccatcgagcccccacctaccccagatctgcagcttcttagcttttatctgaatagtccttgcacagttgcttgcctctctgtcacatcagttcagcacatagcagcacatcctggtgttgccgaggtattggctagaatttattcttaattagatgtttaaagcatttactccactgttaaagttgtcttagtgtagtcaggtattgacatgacataagaaagcatgaaactaccacatttacaaaatatgagggatttggggtttggttttttttgtttgtttggttggtttttttttttttttggtttttaactattttagactcaaataatatcatacctgtgtacttgtacataaaaacaaaattattactgagtaaaaagattaatcg

SEQ ID NO: 3862 - DNA, 449 bp, Rattus norvegicus
  Genbank Accession No. NM_053982
accgtcaccatggtgcgaatgaatgttctggcagatgctctcaagagcatcaacaacgcggagaagaggggcaaacgccaggtcctcatcaggccgtgttccaaagtcatcgttcggttcctaactgtgatgatgaagcatggctacattggtgaattcgagatcattgatgatcacagagctgggaagattgttgtgaacctcacaggaaggttgaacaagtgtggagttataagccctagatttgatgttcaactcaaagacctagagaagtggcagaacaatctgctcccatcacggcagtttggtttcattgtgctgacgacctcggctggcatcatggaccatgaagaggcaagacgaaaacatacaggagggaaaatcctgggattctttttttaaatgtaaagcataaataaaaagcctctgtggactgtgaaaaaaaaaaa

SEQ ID NO: 3863 - DNA, 1107 bp, Rattus norvegicus
  Genbank Accession No. NM_053985
agcggtttggtcgttcgttggaggagcttcgtcttgttctgctctgcgattgcggcgcttgttcgagcgcttacagcggcgcgtcggtcccagcaagggcctcagacttcagctttgggtgagagaagatggcccgaaccaagcagaccgctaggaagtccaccggagggaaagccccccgcaaacagctggccaccaaggcggcccggaaaagcgcgccctctactggcggggtgaagaaacctcatcgctacaggcccgggaccgtggctctaagagagatccgtcgttaccagaaatcgactgagctgctcatccggaagctacccttccagaggttggtgagggagatcgcccaggatttcaaaaccgacttgaggtttcaaagtgcagccatcggtgcccttcaggaggctagcgaggcatacctggtggggttgtttgaagataccaatctgtgtgccatccacgccaagagagtcaccatcatgcccaaagacatccagttggctcgccggatacggggggagagagcttaagttgaagcgatttttatggcattttgtagtaaattctgtaaaatactttggtttaatttgtgactttttttgtaagaaattgtttataatatgttgcatttgtacttaagtcattccatctttcactcaggatgaatggaaagagtgactgttcacagacctcagtgatgtgagcactgtggctcaggagtgacaagttgctaatatgcagaagggatgggtgatacttcttgcttctcatgatgcatgtttctgtatgttaatgacttgttgggtagctattaaggtactagaattgataaatgtgtacagggtccttttgcaataaaactggttatgacttgatccaagtgtttaaccatacatcactgtgatagaatgtgggctttttcaaaggttgaagatacaagttttagccacagtgtaacagtttcctttaaaaaaaaaaaagtaaacctggcagctatagaatacactatgtgcatttataatagctattttatatattgtagtgttcaacatttttaaattaaatgttttacattcacaaaaaaaaaaaaaaaaaaaa

SEQ ID NO: 3864 - DNA, 3607 bp, Rattus norvegicus
  Genbank Accession No. NM_053986
gtcggctgagcggcgccggatccctggcaaaactgtggcacgaaccccgcatcgggtcggacccgcgttccccaggcgccggccagcgagcagcacgcgaggcgagcggcagagcggttgccgggcgagctggaaaccatggccaagaaggaggtaaaatcctcacttctggacaatatgatcggcgttggagatacggttctcttggagcctctcaacgaggagacgttcatcgacaacctgaagaagcgcttcgatcacaatgagatatatacatacatcgggagtgtggttatatctgttaacccctaccggtccttgcccatttattcaccagagaaagtggaagattacagaaatagaaacttctatgaactgagccctcacatctttgctttgtcggatgaagcatacagatccctccgtgatcaagataaagatcagtgcattctcattactggggagagtggagcgggaaaaacagaggccagcaagcttgtgatgtcctatgtcgctgcagtgtgtggaaaaggagcagaagttaatcaggtcaaggaacagcttctccagtccacccctgtcctggaagcttttggaaatgccaagactgtaaggaatgacaattcatccagattcggcaaatacatggatattgaatttgactttaaaggcgatccgctgggaggagtgataagtaactatcttttagagaaatctcgtgttgttaagcagccgagaggtgaaagaaacttccacgtgttctatcagctgctctcgggtgcctctgaggaactcctccacaagcttaaactggagcgggatttcagcagatacaactatctgagtctggactctgccaaagtgaatggtgtggacgacgctgccaatttcagaactgtcaggaatgccatgcagatcgtgggcttttcggatcctgaggccgagtctgtcctggaggttgtggcagctgtcttgaaactggggaacatcgagttcaagcctgaatcacgaatgaacggtttggatgaaagcaaaatcaaagacaaaaatgagttaaaagaaatttgtgagttgaccagcatcgatcaagtggttttagaaagagcgttcagtttccgaacggttgaggcgaagcaggagaaagtttcaaccacattgaatgtggctcaggcttattatgcccgtgatgccctggctaaaaacctctacagccggttgttttcatggttggtaaatcgaatcaacgaaagcattaaggcacaaaccaaagtgagaaagaaggtcatgggtgttctggacatttatggctttgagatatttgaggacaacagcttcgagcagttcattattaattattgtaatgaaaagcttcaacaaatcttcattgaactgaccctcaaagaagagcaagaggaatatattcgtgaggacatagaatggactcacattgactacttcaacaatgctatcatttgcgacctaatagaaaacaacacaaacggaatcttggccatgctggatgaagagtgcctgagacccggcactgttacagatgagaccttcctggaaaagctgaaccaagtctgtgccacccaccagcacttcgagagcaggatgagcaaatgttcccgcttcctcaatgacacgaccctgcctcacagctgcttcagaatccagcattatgctggcaaggtgctataccaggtggaagggtttgttgacaagaacaatgaccttctgtaccgagacctgtctcaagccatgtggaaggctggccatgccctcatcaagtctctgttccctgaagggaatcctgcaaaggtcaacctgaaaagacctcctactgcagggtcccagttcaaggcgtcggtggccaccctgatgaaaaacctgcagaccaagaacccgaactatatcaggtgcatcaagccgaacgataaaaaggccgctcacattttcagtgagagtctcgtgtgccatcagatccggtacctgggtcttctggagaacgttcgagtgagacgggcaggctatgccttcaggcaggcctatgaaccttgtctggaaagatacaagatgctttgcaaacaaacatggcctcactggaagggaccagcaaggtctggtgtggaagttctgtttaatgagctagagattcccgtggaagagtactccttcggtagatccaagatattcatccgaaacccaaggacattattccaattagaagacctaaggaagcagcggctggaggacctggccactctcattcagaagatttatcgaggatggaaatgtcgtacacattttctgctcatgaaaagaagccaagtcgtgattgccgcctggtacaggagatacgcgcaacaaaagcgatatcagcagataaagagttcagccctggtgattcagtcttacatccggggctggaaggctagaaaaatcctgcgggagctgaagcatcagaaacgctgcaaggaggcagccaccaccatcgcagcatactggcacggcacccaggcgcgaaaggagcggaggcggctgaaggacgaggctaggaataagcacgctattgcagttatttgggctttctggcttggatcgaaggcacgaagggaattgaaacgcttgaaggaggaggctaggcgtaagcatgcagttgctgtcatttgggcttactggcttggactgaaggtacgaagggagtacaggaaattctttagagcaaatgctggaaagaaaatctatgagtttacacttcaaagaattgtgcaaaaatacttgttggaaatgaaaaataaaatgccttccttgtcaccaatagataaaaattggccatcaagaccttacctattcttggattcgactcacaaggagctaaaaaggatcttccacttgtggaggtgtaaaaaatacagggatcaattcacagaccagcagaaacttatttatgaagagaagctggaggccagtgaactcttcaaagacaagaaggctttatatccttctagtgttggtcagccattccaaggagcttacctggaaatcaacaagaacccaaaatataagaaactcaaagatgccattgaagagaagatcattattgctgaggttgtgaacaaaatcaaccgggctaatgggaagagtacatctcggattttcctcttaacaaacaataaccttctccttgctgaccaaaagtcggggcagatcaagtccgaggtccccctggtggatgtgactaaggtctccatgagttcacagaatgatggtttctttgcagtacacctcaaggagggttcagaagcagctagtaagggtgactttctcttcagcagtgaccacctgattgaaatggcaaccaagttgtatcgcacgactcttagccaaactaaacagaagctcaatatcgagatttccgatgagttcctggtacagttcagacaggacaaagtatgtgtgaagtttattcaaggcaaccagaaaaacgggagcgtgccaacctgcaaacgaaagaacaacaggcttcttgaagtcgctgtcccttaagtgaggcctcctctctgttctcacggacttgtttcctcgtaacagtgcaattttactt

SEQ ID NO: 3865 - DNA, 3180 bp, Rattus norvegicus
  Genbank Accession No. NM_053989
agctagaagagagaggatgactgcacgagaagaggccagtttaagaacacttgaaggcagacgacgtgccacattgctgagtgcccggcaggaatgatgtctgctcgaggagattttctcaattatgccctgtctttaatgagatctcataatgatgagcattctgacgttcttccagtgttggatgtgtgctcattgaaacatgtggcatatgtttttcaagcccttatatattggattaaagcaatgaatcaacagacaactttagacacccctcaactggagcgcaaaaggacacgagaacttctggaactgggtattgataatgaagattcagaacacgagaatgatgatgacaccagtcaaagcgctactttgaatgataaggatgatgaatctcttcctgcagaaaccggccaaaaccatccatttttccgacgttcagattctatgacattccttggatgtatacctccaaatccatttgaagtgcctttggctgaagccatacccctggctgatcagcctcatctgttgcagccaaatgctagaaaggaagatctctttggtcgcccaagtcagggtctttattcgtcatctgccggtagcgggaaatgcttagtggaagttacaatggacagaaattgtctcgaggttcttccaactaaaatgtcttatgctgccaatctaaaaaatgtaatgaacatgcaaaaccggcagaagaaagcaggggaagaccagagcatgctggccgaagaggctgacagttcaaagccagggccatccgctcacgatgttgccgcccagttgaaaagcagtttactagcagagataggactcacagaaagcgaagggcctccccttacatctttcaggccccagtgcagtttcatggggatggtgatctctcatgacatgctgctggggcgctggcgcctctctttagaactgtttggcagagtattcatggaagatgttggagcggagcctggatcgatcttaactgaattgggtggttttgaggtaaaagaatcaaagttccgtagagagatggaaaaactgagaaaccagcaatcaagagatttatcactagaggttgatcgagatcgagatcttctcattcagcagactatgagacaactcaacaatcattttggtcgaagatgtgctaccacaccaatggctgtccacagagttaaagtcacatttaaggatgaaccaggagagggcagtggtgtagcacggagtttctatacagccattgcacaagcctttttatcaaatgaaaaattgccaaatctagattgtatccaaaatgccaacaaaggtactcatacaagtttaatgcaaagattgaggaacagaggcgagagagatcgggaaagagaaagagaacgggaaatgaggaggagcagtggcttgcgagcaggatctcggagagaccgcgatcgagacttcaggagacagctgtccatcgacaccaggccttttagacctgcttctgaggggaaccctagtgatgaccctgaccctcttccagctcatcggcaggcactcggagagaggctgtacccccgagtgcaagcgatgcagcctgcctttgccagtaaaatcaccggcatgctgctggagctgtccccagctcagctgcttctccttctggcgagtgaggactctctgagggcgagagttgaggaggccatggagctcatcgtcgcccacggacgggaaaatggagctgacagtatcttggacctcggattattagactcctcagaaaaggtacaggaaaaccgaaagcgtcatggctctagcagaagtgtggtagatatggatttagatgacaccgatgatggtgacgacaatgctcctttgttttaccaacctggaaagcgagggttttatactccgagacctggcaaaaacacagaagcaaggctgaattgtttcagaaacatcggcaggattcttggactatgtctgttgcaaaatgaactatgtcctatcacattgaataggcatgtaattaaagtgttgcttggtagaaaagtcaactggcatgactttgcttttttcgaccctgtgatgtatgagagtttacgacaactgatccttgcatctcagagttcagatgccgatgctgttttctcagcaatggacttggcgtttgcagttgacctgtgtaaagaagagggtggaggccaggttgaacttattccaaatggtgtaaatataccagtcactccgcagaatgtatatgagtatgtaaggaaatatgcggagcacagaatgctggtggttgcagaacagccattgcacgcaatgagaaagggtctactagatgtgcttccaaaaaattctttagaagacttaacagcagaggatttccgacttttggtgaacggctgtggtgaagtcaatgtgcagatgctcatcagtttcacgtctttcaatgatgagtcaggagagaatgctgagaagctcctgcagttcaaacgttggttctggtcaatagtagagagaatgagcatgactgagcggcaggacctggtttacttctggacatcaagcccatcattgccagccagtgaagaaggttttcagcctatgccctcaatcacaataagaccaccagatgaccaacatcttcctactgcaaatacttgtatttctcgactttatgtcccactctattcctctaaacagattctcaaacaaaaattactactcgccattaagaccaagaattttggttttgtgtagagtataaaaagtgtgtattgctgtgtaatattactagctaattttgtagattttttttcccatttgtctataaaagtttatggaagttaatgctgtcatacccccctggtggtaccttacagagattaaatgcaaacattccttgctgagtttgtagcttaaaggcctaagaagcactggcaccttttctctatgatggtttgctagtcgccaacttctaggtctaaccccagccaaagatgacagcagaacaacataatttacactgtgatttatcttttttgctgagggggaaaaaatgtaaaatgttctgaaaattcactgctgcctttgtggaaagtgtttcagcaaaggttcttgtatagagggaatagggaatttcaaaataaaaaattaagtatgaaaaaaaaaaaaaaa

SEQ ID NO: 3866 - DNA, 1494 bp, Rattus norvegicus
  Genbank Accession No. NM_053990
ttccgctcgcgctcccccgccgccatgtcggctaccatcgagcgggagttcgaggaactggatgctcagtgtcgctggcagccgttatacttggaaattcgaaatgaatcccatgactatcctcatagagtggccaagtttccagaaaacagaaatcgaaacagatacagagatgtaagcccatatgatcacagtcgtgttaaactgcagagtgctgaaaatgattatattaatgccagcttagttgacatagaagaggcacaaagaagttacatcttaacacagggcccacttcctaacacgtgctgccatttctggctcatggtgtggcagcaaaagaccagagcagttgtcatgctaaaccgaactgtagagaaagaatcggttaaatgtgcacagtactggccaacggatgaccgagagatggtgtttaaggaaacaggattcagcgtgaagctcttatctgaagatgtgaaatcatattatacagtacatctactacagttagaaaatatcaatagtggtgaaaccagaaccatatctcactttcattataccacctggccagattttggcgttccggagtcaccagcttcattcctaaatttcttgtttaaagttagagaatctggttctttgaaccctgaccatgggcctgcagtgatccattgcagtgcaggcatcgggcgttctggcaccttctctcttgtagatacctgtctcgttctgatggagaaaggagaggatgttaatgtgaaacaaatattactgagtatgagaaagtatcgaatgggactcattcagactccggaccagctcagattctcctacatggccataatagaaggagcaaagtatacaaaaggagattcaaatatacagaacagaacaatgactgagaagtacaacgggaagagaatagggtcagaagatgaaaagttaacaggactttcttctaaggttccagatactgtggaagagagcagtgagagtattctccggaaacgcattcgagaggatagaaaggctacaaccgctcagaaggtgcagcagatgagacagaggctaaatgaaactgaacggaaaaggaaaaggccaagattgacagacacctaaatgttcatgacttgagactattctgcagctataaattttgaacctttgatgtgcaaagcaagacctgaagcccactccggaaactaaagtgaggcttgctaaccctgtagattgcctcacaagttgtctgtttacaaagtaagctttacatccaggggatgaagaacgccaccagcagaagacttgcaaaccctttaatttgacgtattgttttttaacatgtgtatgaattgtagaaagatgtaaagaaaataaaattaggagagactactttgtattgtactgccattcctaatgtatttttatactttttggcagcattaaatatttttattaaatagacaaaaaaaaaaaaaaaaaaaaaaaaaaaaaaaaaaa

SEQ ID NO: 3867 - DNA, 1420 bp, Rattus norvegicus
  Genbank Accession No. NM_053995
ccctcaatagccacactatttattttatttcaattaaaaatttcttcccaaacctttcctgcacctccctcacccaaaactataaactcggtgccatgatgctggccgcccgtctttccagacccctgtcacagctcccaggaaaagctctaagtgtctgtgatagagaaaatgggacaagacacacactgttgttttacccagcttctttcagccctgacacccgtcggacctacaccagccaggcagatgcggctagtggcaaagctgtcctggttacaggctgtgactctggatttgggttctctttggccaagcatctacactcaaaaggtttccttgtatttgccggatgtttgttgaaggaacaaggcgatgctggggtcagggagctggacagcctgaagagtgaccggctgagaaccatccagctcaatgtctgcaacagtgaggaggtggagaaagcggtggagaccgtccgctccggcctgaaggatcctgagaagggaatgtggggcctggttaacaacgcaggcatctcaacgtttggggaggtggagttcactagcatggagacgtataaggaggtggccgaagtgaacctctggggaactgtgcgcacaacaaaatccttccttccccttctccgaagagccaaaggccgtgttgttaacatcagcagcatgctgggtcgcatggccaacccagcccgctcaccatactgcatcaccaagtttggggtagaggctttctcggactgcctacgctatgagatgcaccctctgggtgtgaaggtcagtgtggtggagcctggcaacttcatagctgccaccagcctctatagccctgagcgtatccaggccattgccaagaagatgtgggatgagctgccagaggtcgtccgcaaagactatggcaagaagtacttcgatgaaaagattgccaagatggagacctactgcaacagcggttccaccgatacgtcctccgtcatcaacgctgtcacccatgccctgactgctgccaccccttatacccgctaccatcccatggactactactggtggctgcggatgcaggtcatgacccattttcctggagccatctctgacaagatctacatacactgaagagctgaagaggtccctgcagcctctgccagggagcctgatgggagggagttcatacagttatcttttgattaaccattgtgggttgtccactgtcttaggaagacctattttaaccttacgtgttcaatgtggtgaatggtttgggccttcacaaatacagggcactggtgggtggccctaaccctcaaggccaatatggtgcttctatctgtctatctagagttgattttatataaagatttgtgggaaatacctttatattaaagacgttattagaatagaaaaaa

SEQ ID NO: 3868 - DNA, 2722 bp, Rattus norvegicus
  Genbank Accession No. NM_053996
aaaggcgcagagataggaccagtgctcggcgcccgcttggctggctgactgcgctcttgcaagcaccggtgccagctctccaagatgaagaagctccaggaagctcacctccgcaagcctgtcaccccagacctgctgatgactcccagtgaccagggtgatgtggacctggatgtagactttgcagcagacagaggcaactggacgggcaagctggacttcttgctgtcctgcatcggctactgtgtgggcttgggaaatgtctggcggtttccctatcgagcctacaccaatggaggcggagccttcctcgtgccctacttcctcatgctggccatctgtggcatccccctcttctttcttgagctctccctgggccagttctccagcctgggacccctggctgtctggaaaatcagccccctcttcaaaggtgcgggtgcagccatgctgctcatcgtgggcctggtggccatctactacaacatgatcatcgcctacgtcctcttctacctcttcgcctccctcaccagcaacctgccctgggagcattgcggcaactggtggaacacagaacgctgcctggagcacagaggccccaaggatggcaacggggcactgcctcttaacctcagcagcactgtcagccccagtgaggagtactggagccgatatgtcctgcacattcagggcagccagggcatcggccgacccggggagattcgctggaacctctgcctctgcctgctgctggcctgggtcatcgtgtttctctgtatcctgaagggggtgaagtcctcgggcaaggtggtgtatttcacagccacctttccctacctcatcctgctcatgctcctggttcgaggagtgacccttcccggggcctggaagggcatccagttctatctcaccccccaattccaccacctgctgtcttccaaggtgtggattgaagctgctcttcagatcttctactctctaggagtgggttttgggggtcttctcacctttgcctcctacaacacattccaccagaacatctacagagacaccttcattgtcactctgggcaatgccatcaccagcatcctggctggttttgctatcttctcggtgctgggctacatgtcgcaggagctgggtgtgcctgtggaccaagtggccaaagcaggccctggcctggcctttgttatctacccacaggccatgactatgttgcctctgtcacccttctggtccttcctcttcttcttcatgcttctgactcttggcctcgatagccagtttgcctttctggaaaccatagtgactgcagtgaccgatgagttcccatactacctacggcccaagaaggcagtgttctcaggcctcatctgtgtagccatgtacctgatgggactgatcctcaccaccgatggggggatgtactggctggtccttctggatgactacagcgccagcttcggactcatggtggtggtgattaccacatgcctcgctgtcacccgggtatacggcatccagcggttttgtcgtgacatccacatgatgctgggcttcaagccaggactctacttcagggcctgctggctgtttttgtctccggccacactcttggccttgctggtgtacagtatcgtcaagtaccagccctcggaatacggtagctatcgcttccccgcctgggccgagctgctaggcatcctgatgggcctgctctcctgcctcatgatcccagctggcatgctggtagctgtgcttcgagaggagggctcgctctgggagcgacttcagcaagccagccgtcctgctatagactggggcccatcactggaagagaaccggacgggcatgtatgtggccaccctggctgggagccagtcaccaaaaccactgatggtacacatgcgaaaatatgggggcatcaccagcttcgagaatacagccattgaggtggaccgtgagatcgcagaggaggaagaggagtccatgatgtgagaccagacacctccaaacaggagggctggtcggggcctccccgtctgtcccttccttggccacaggggatagctttgtctgttgggattctgacaggcaatgggaggttgccatggcaacgacagtccccagcctaagtccctctttgtggcctctacatctcctggaacctctagatggacatacatatactaggtaacccattcaaagctgaaacgattcagctcagccctcagtttgtgagggggtgcgttgaagccagggagagaagagctggaccaaggtgacatgcccaagaggacttgttcccaagcctcctccagccagtcaactccctttcccttgggggagcaagcaccatatctgacatctttgttcagacactttgacaagatacatttccatacaagccaactttaaaccccaggttcagggtagcgagaacctggagagccccaaggccctggatatagatagaatggcagcgaccaaattgggtagaaaagtctttgtgggttcctgtgttaaggccagttttcccagaagaagtgggagctttagggctgagaggtgtgaaagattgcagaagaggctagagggaaggtttgcgggtcagagctgcccctgagccaggaggaggcccaacctgccagagcagagaccaggaggggctggagattgtggtgctcccgggttatgagagggaataaagactcgcagggcc

SEQ ID NO: 3869 - DNA, 840 bp, Rattus norvegicus
  Genbank Accession No. NM_053998
atcacgacagcctactacaggggtgccatgggtatcatgctggtctacgacattaccaatgagaagtccttcgacaacatccggaattccattcggaacattgaggagcatgcctctgcagatgtggagaagatgatactggggaataagtgtgatgtgaacgacaagaggcaggtgtccaaggaacggggagaaaagctggcactcgactatgggatcaagttcatggagaccagcgcgaaggccaacatcaatgtggagaacgcatttttcactctcgccagggatatcaaagcaaaaatggacaaaaattggaacccaacaaccctcaggagcagccatggagtcaagatcacagtggagcagcagaagaggaggagcttcttccggtgcagtctcctgtgaggacaaggtctctgcccatttgagcctgcgctcagcccagctgactgtgcctgccccgggcgagcctccacctccgatgctcggacacagctgcccggactcaattgagaaattgattattttagtaaccgtctgatcttttccaccttcagagatggaccaagttagaattttgctgtttttcctgtgtcatctgccagtcaggcctatccgtcccctgccgcattgccatagatggagagaggtgggttggggcaaggcagcctccatctccagccttctgcccctccaccacagaagggaggtcagtggcagtggcagtgccagcctgcctggccccatactccaagcaccaccaccagggccactgagggcaagctggcaccctgccttcacccgttctcagttgtggacaagtgacaacttgtccactgt

SEQ ID NO: 3870 - DNA, 2142 bp, Rattus norvegicus
  Genbank Accession No. NM_053999
ggggccgccgtcgctgtcctagccgccgccgctgccgccgccgccgctgccgtcttcaccgcgggagaaggagcacgagacaggacgcccctgagtgaacgccaccatcctgccgacagctccgcccgggctgcttcctttccgcccaggtccccgtcccctcccccctcaggtgccatccgcctccatccgcgccctcgatccccccatccccaggtgagggggctgagccccggtcgcggaggcccggacgagcccggcagggtcaccatttgcagcgcgacatggcaggagctggaggagggaatgatattcaatggtgtttttctcaggtgaaaggagcagttgatgatgacgtagcagaagcagatataatttctacagtagagtttaatcattctggagaattactagccacaggagataaaggtgggagagtcgtcatctttcaacaagagcaggagaacaaaatccagtctcatagcagaggagaatacaatgtttacagcaccttccagagccatgagccagaatttgactacttgaaaagcttagaaatagaagagaagatcaacaaaattaggtggttaccccagaaaaatgctgcccagtttttattgtctaccaatgataaaacaataaaattatggaaaatcagtgaaagagacaaaagaccagaaggctataacttgaaagaggaagatggaaggtatagagaccctactacagtcactacactacgagtgccggtgtttaggcccatggatctaatggtggaggccagtccgcggagaatatttgccaacgcccatacctaccacatcaactccatttctatcaatagtgattatgaaacctacttatcagcagatgatttgcgaattaatctctggcatctggaaattacagacaggagttttaatattgtggacattaagcctgccaatatggaggagctcacggaggtgatcacagccgcagagttccatcccaacagctgtaacacgtttgtgtacagcagcagtaaagggaccattcgcttatgtgacatgagggcatctgcactctgtgacaggcattctaaactgtttgaagaacccgaagatcccagcaacaggtcgtttttttctgaaatcatctcctcaatttctgatgtaaaattcagccacagtggtcgctatatgatgactagagactatttgtcagtcaaagtttgggacttgaatatggaaaacaggcccgtggagacataccaggtacacgaatacctcagaagtaaactttgctcactgtatgaaaacgactgcatatttgacaaatttgaatgttgttggaatgggtctgacagtgttgtcatgactggatcctacaataatttcttcagaatgttcgacaggaacacaaagcgggatataactctagaagcatcgcgagaaaacaataagcctcgtacagttttgaaaccacgcaaagtctgtgcaagtggcaagcgaaagaaagatgaaataagtgttgacagtctagacttcaacaagaaaatccttcatacagcctggcatcccaaggaaaacatcattgctgtagcgactacaaacaatctgtatatatttcaagacaaagtgaattaggctggcattctctgcagaggagccacttcctgcttagtgagatagttgaatctagcattcgtacctataagagagcggtccattgtggcgtccctttccagtgtttgacagtgtgccattcaacaacacatttgatagccacatggagaaagctgtgcggatgcatcccgggctgtttccatgtctgctagccatttagggaagggaagggcacttttaatttaatgacttcttgcaccatcttgcctggtggactggactggactgtgtcagcattgatgtactccactttttatgccttccattgtgatgacgtcaaacacagtgaacgccttcagtcatgctatggaatttgtgtatcctcattactgtatcatttgtgggagtgcaagggtaatcatttattgaactgcaagagcaagatatttgtgcggaatgatcatgggtggggccaagagaaatttaagaaagcttttaattctcgatgtgttgtcctgggtaactagggaagatg

SEQ ID NO: 3871 - DNA, 1938 bp, Rattus norvegicus
  Genbank Accession No. NM_054001
ggccaggcgatcccagcacccgcgatcgcgcgctctgtgctccgagggccgtgctcgcctggtgcctactccagggctgtgtacaccgcgtcgggctcggctgagcccgcaccaggagggcgcgggagccgcagggccctggagctttgggcgactgctacgcggccttggccgaggctcttccttgctcgccgttctgtcgcgggcctggcccgtgaaccgctcacagtatggcccgatgctgcttctacacggcggggacactgtctctgctgctgctggtgaccagtgtcacgctgctagtggctcgagtctttcagaaggcagtggaccagacgatcgagaagaatatggtattacaaaatggtaccaaggtctttgattcctgggagaagccccctctacctgtgtacatccagttttatttcttcaatgtcaccaatccagaggagatcctccaaggagaaatccccctgctagaagaagtggggccgtacacctacagggagctcaggaacaaggcaaacgttcagtttggagaaaatggaacaaccatatctgccgtcaccaataaggcatatatttttgaacgaaaccagtctgttggagaccctaccgttgacttgattagaacaataaatattcctctgttgactgttgtggaaatggcccagcagcccttcctcagggagatcatcgaggccatgctgaaagcttatcagcagacgctgtttgtcactcacactgtacatgaactgctctggggctacaaagatgaggtcttgtcgctcgtccatattttcagacctgacgtctcccctaactttggcctgttctatgagagaaatggaactaatgatggggagtatgtttttctgactggagaggacaattacctgaactttacaaaaattgtggagtggaatggaaaaacgtcgctggactggtggacgacggacacgtgcaatatgatcaacgggacagacggagattcttttcacccattaataagcaaggatgagaccctgtacatcttcccatctgacttctgcaggtccgtctatataactttcagtagctttgagaacgtagaaggactgcctgcttttcggtataaggtgcctgcagaaatactagccaattcctccgaaaacgctggcttctgtatacccgagggaaactgcatggacgcgggagtgctgaacgtcagcatttgcaagaatggtgcgcccattatcatgtctttcccacacttttaccaagccgacgagaagttcgtttcggccataaaaggcatgcgtccaaacaaggaagaacatgagtcatttgtggacattaatcctttgacaggaattattttaagaggggccaagagattccaaatcaacacgtacgttaagaagctggatgactttgtggaaacgggaaacattaggactatggttttcccagtgatgtatctcaatgagagtgttctcattgacaaagagactgcaagtcaactgaagtctgtgattaacacaactttgattgtcaccaacataccctacatcatcatggcactgggcgtgttctttggcttgattttcacgtggctggcgtgtcgaggacaggggtctacggatgagggaactgcagatgaaagggcacccctcatacggacctaatgggacttacctgttgcctgagcttggtgagagaatgtgagaactgacctgacctggaccaggacagggaaaagcctgcatctcacgggctcctggcctgtcaagaagggagatgaagccgcagcactggcacgcgagaagaccctcctggacagaggggaccgagcaggtgacatggctggcaattacgctttataaaatcatgtctctgaaactgtgtcaatgtgtcttagggagtatttaataaattatatagaaacctttaaaaacc

SEQ ID NO: 3872 - DNA, 3755 bp, Rattus norvegicus
  Genbank Accession No. NM_054006
gaattccttttttttttaatactagcaactttcattctttggaacttgtgctgaaaaaaagaagagtcagcaaatactactgaaagtgcaatattcgattatcactgcgagatgagctttgatccaaaccttctccacaacaatggacacaacgggtaccccaatggtacttctgcagcactccgtgaaactggggttattgaaaaactgctgacctcttatggatttattcagtgttcagaacggcaagctaggcttttcttccactgttcacagtataatggcaacctccaggacttaaaagtaggagatgatgtggaatttgaagtatcatctgaccggaggactgggaaacctattgctattaaattggtgaagataaaaccagaaatacatcctgaagaacgaatgaatggacaagttgtgtgcgctgttcctcacaacttagagagtaaatctccagctgccccgggtcagagtccaacagggagtgtatgctacgaacgtaatggggaagtattttatctgacttacacctctgaagatgtggaagggaacgttcagctggaaactggagacaaaattaactttgtaattgataacaataaacacactggtgctgtaagtgctcgtaacattatgctgttgaaaaagaaacaagctcgctatcaaggagtagtttgtgccatgaaggaggcgtttggctttattgaaagaggtgatgttgtaaaagagatattctttcactatagtgaatttaaaggtgatctagaaaccctgcagcctggagatgacgtggaattcacaatcaaggacagaaatggtaaagaagttgcaacagatgtcagactattgcctcaaggaacagtcatttttgaagatatcagcattgaacattttgaaggaactgtaaccaaagttatcccaaaagtacccagtaaaaaccagaatgacccattgccaggacgaatcaaagttgactttgtgattcctaaagaacttccctttggagacaaagacacaaaatccaaagtgaccctgctggaaggtgaccatgttaggtttaatatttcaacagaccgacgtgacaaattagaacgagcaaccaacatagaggttctatcaaatacatttcagttcactaatgaagccagagagatgggtgtgattgctgccatgagagatggttttggcttcatcaagtgtgtggaccgtgatgctcgtatgttcttccacttcagtgagattctcgatgggaaccagctccacattgcagatgaagtggagtttactgtggtccctgatatgctctctgcccaaagaaatcatgctattaggattaaaaaacttcccaagggcacggtttcattccattcccattcagatcatcgttttctgggcaccgtagaaaaagaagccactttttctaatcctaaaactacaagcccaaataaaggcaaagacaaggaggcagaagatggcattattgcttatgatgactgtggggtgaaactgactattgcttttcaagccaaggatgtggaaggatctacttctcctcaaataggagataaggttgaatttagtattagtgacaaacagaggcctggacagcagattgcaacttgtgtgagacttttaggtcgtaattctaattccaaaaggctcttgggttatgtggcaactctgaaagataattttggatttattgaaacagctaatcatgataaggagatatttttccattatagtgagttctctggtgatgttgatagcctggaactgggagacatggttgaatacagcttgtccaaaggcaaaggcaataaagtcagtgctgagaaagtaaacaaaactcactcagtgaatggcatcactgaggaagcaaatcccaccatctactctggtaaagtcattcgtcctctgagaggcgttgatccaacacagattgaataccaaggaatgattgagattgtggaggagggggatatgaaaggtgaagtgtatccttttggcatagttgggatggccaacaaaggggattgcctacagaaaggggagagtgttaagttccagttgtgtgtacttggccaaaatgcacaaactatggcctacaacatcacaccccttcgtagggctactgtggagtgtgtgaaagatcagtttggctttattaactatgaagtaggagatagcaagaagctctttttccatgtgaaggaagttcaggatggcattgagctacaggcaggagatgaggtggaattctcagtgatccttaatcagcgcactgggaaatgtagcgcctgtaatgtttggcgagtctgtgaaggccccaaagctgttgcagctcctcgacctgatcggttggttaatcgcttaaagaacatcaccctggatgatgccagtgctccacgtctaatggttcttcgtcagccaaggggaccagataactcaatgggatttggtgcagaaagaaagatccgtcaagctggtgtcattgactaaccacgtccacaaagcacatcattaatccactatggtcaagttggggggattctggtgaagggttctgaatatcttcctcttcatccctcccaaaatctggaatacttattctattgagctattacaccagttttaacaccttcctcgtgttatgtttaaagaaaaaataaataaatttaagaaaccattttaaaattatgcacagttgcagcctggaaaacttaaggtggcgccttatagtgtcaatttaggagctttatttggtgcatttaacgcaactggtaattgcaaattccacttggcctgtgtaagtgaacaaaacagactgttactttgttggccctatgaaattctgcactctagtcagtatatatactctaccttcatgacttaatactcagctgcattcttttccttttttccctctgttcattatgctttaattctgaggaccatatgaaggtagaatatattacctttaaaaattgcaaaatttatatagcaaacgattttcttaagttgatggccaaatgttaaaatgttattttcatatcatttataatcttgtcacaatccacttaacgaagtttgattacatttcagtgaaaattatcttccataataggttttttttttccttcctgggatggggggcaaataactttactacaattagtatgtatggtgcagaatttcatgcaaatgaagtgtgccagcagtgtgataatttaaacatatttaaacaaaagacgaatgcacaaaattgctgctgcttagatcactgcagcttctaggacccagtttcttttactgatttaaaaacaaaatgaaaaaaaaataataaaaaagttgtgcctgaaatgaatcctgttttttttataagtagccccctggttccagtgccctgttgaatacaggcacttgatccttggtgcagcttctgttcaactttgtatcacgggaacggattggcctgatttcttggccttcctcttgaattggccccaaacagggtccctggcaagtggagtgaaggctttttgtctaaagatgacaagggtcagctcaggggttgtgggggagggcgttttcatcttccccgttgtcacttgaggttttgaactctgggtaaagaggccgtttatctttgtaaacacaaaacatttttgctttctccggtttcatgttaatggcgaaagaatggaagcgaataaagttttactgatttttgaaaaaaaaaggaattc

SEQ ID NO: 3873 - DNA, 2307 bp, Rattus norvegicus
  Genbank Accession No. NM_054010
aattccggcctgtatgtcccttctgccccgagctgtctcattactgccagctcttgcgcagttttgtctgggtttgtttccacgtctgtggtttctgtcgccgctaccctgtctccatcgcccagctcagcttctggccttcctccgatactccacgggagagcccagagagcctccggagctggtgagctgagaagtcatggaagaagtttcatcctgctccctccgcagcactctgttccagcaggaagaacagaacaggattacctaccggatcccagcactgctgtacattcctcccacccacaccttcctggccttcgcagagatgcgtacctcaagcagagatgaggatgctgtctacctggtgttcagacgaggggtgatgaaggggtgctctgttgagtggggcccccaacagccactgatggaggccacattacctgggcatcgcaccatgagcccctgccctgtgtgggagaagaatactggccgtgtatacctgtttttcatctgcgtgcagggccatgttagtgagcgctggcagcttctgtggggcaggaatgctgcccgtctctgcttcctttacagtgaggactctgggtgctcgtggggtgaagtgaaagatttgactgaggaagtcgttggctcagagatgaagcactgggccacgtttgctgtgggcccaggtcatggcatccagctgcagtcggggaggctgctcattcccgcctatgcctacttgatatcatgctggtttctctgctttccatgttcagtcaagccccattccctaatgttctacagtgatgacttaggagtcacatggcactgtggcaagttcattaagccccaggtgacaggggagtgccaagtggcagaagtgcctgggaaggctggtaaccttgtgctctactgcagtgcccgaacaccaaacaaattccgagcagaggcttttagcactgatagtggtgactgctttcagaaaccaaccctgaaccaacaactctgcgagcctcgtggtggctgccaaggtagtgtagtgagcacccggcctttgaagatgccatacacatgtcaagactcaagtggtaaagatgttccctctactcagaaatgccctctgatggacagatctctggaggtggaggaaggagctggagcaccatcagggacatggctcttgtactcacatccaactaacaagaagaagagaatgaacctaggcatctactacaaccaaaaccccttggaggtgaactactggtcccgcccgtggatcttgaaccgtgggcccagtggctactctgacctggctgtggtagaaggacagggcttgttcgcgtgcttatttgagtgtggggagaggcatgaggatgagaagattgacttttgtctgttttcagaccaagaggtcctgagctgtgacgactgtaccagccctagtagcaactaaggccaaataaagactgatgggtgaggcccagctgtccacagaagggagtggcaatggcagctgggatagcagaggtctctgatgtccacagaaaatctaagaactaatgatctgctccttgcatttttttccagttttccctcaaacgagcatagtaaaaattgtgccatatcttacacaacaaggctctttgagctgggagtttggagactgtgctgtagttgtggctctgctgttggcttgcttcaggactctggatgtatccctgaactctttggacatcgagtctccatttgtataatgagaagattggtgcaggatctcttcccttcccttcccttcccttcccttcccttcccttcccttcccttcccttcccttcccttcccttcccttcccttcctttcccttcccttctttccttcccctcttttcttattaaaaggagaggctgtgtgctcacttcctgctccacaaaccctggattctgatctgaattggagccacagacttgtcttttcaaatgattcactgctcacctgagtattaggtgctaagtaggtgctttaggctagaagaaagatctgtgttgtatttttaataagaaaaaaatcgcgttatccttccaatcatacccagagctgtgcaaattctctatcttaggagacttgagggctggagagatggctcagtggttaagagcactgactgctcttccagaggtcctgagttcaaatcccagcaaccacagggtgactcacaaccatctgtaatgggatctgatgccctcttctggtgtgcatgaagacaacaacagtgtacttaaatgtgataataaataaataaatccc

SEQ ID NO: 3874 - DNA, 1742 bp, Rattus norvegicus
  Genbank Accession No. NM_057097
gagccgcgcactcgagggagcttctgccgccgccgccgccgccgccgccgccgccgccgccgccgccgccgccgccgccgccgccgccgccgccgccgccgaaatgtctacaggggtgccttcagggtccagtgctgccactggcagtaatcgaagactccagcagacacagaatcaagtagatgaggtggtggacatcatgagagtcaatgtggataaggtgttagaaagagaccagaagctctcagagctagacgaccgcgcagatgcactgcaggcaggcgcctcgcagtttgaaacaagtgctgccaagttgaagagaaagtattggtggaagaactgcaagatgtgggcgatagggatcagtgtcctggtgattattgtcattatcatcattgtgtggtgtgtctcttaatgaagaacagaggaaatgaagcctgacggcaggatcttcttcgagactttctacttagaactgcgtgttgtcgcacttcccatgattatttgtgttagtttacatacagttcagtgcctagatgttttttttttttttcccaaaaatgtgcctttgtttttcatatacactcgaggtgtgacctgccctgcccacattttgcacagtgcctttacagatttatggactgggaaagaggacttgtgtgtttcagagtgctgagatctaggtggatgttgtcactgatggcttgtggattcaaggaagaggattttgttcaagtcagctgtccccacacctaacatggacttcaaaaccacagtttaaacctttgggtaattagattcccaacttggaccttccaagaagaacactactgcctaacaaaaatcagtgacaacagcagggcgtgccttattttgataactaggtaacttttcattaagagtacttttgtaagcactaccgaccccgctgtatttaagatgctggtgaagagctcatgctcttatgttagatacggagatgttcactttctagttcttgttgtgtatcacttctaaaacagtattttaatcagaaataaccctttaggaagtttttatagaactgtgaccaaagtttctattttgccaaaagttaaatacaaatgaattgtccataagtttgtcccccagtagtaaattcaaataagtgccaagtgtaactcaaggtgccctttaagaaaaaatgttagtactgtctgagcccgcagcatcttgacagtccttcctgtggaatgctgtaggtacagcttctcatcctgatgtggtttctttcctagagctatagaggtgacctcaaatcacacctgtatgcaagatagtagtttgcagactgcactagcctgtggccactagtgtgatgagagcagcatctgaagcctcacaaaggcaacagtctgcacagagttctgggagactgtggcagtgccaccaggatgtcctgaaatgtgtgtctgtgtgcaaagcagcattagccaaaatgtcataggatctggttctagttttttttatctgatcccctaacattaccgaaacaaaacaagtgttgaagacatgccttgccacatagctagggcctctgtcctggtctgaccccacaactttggtgctgtctcctcgtactctgtcccatgtaagtcgttggctcctgtattaacacagtaatacctcgcttctctgtgcatttagctgggaatgttcccgctatggtgaccggaataaagttattaacatgaaaaaaaaaa

SEQ ID NO: 3875 - DNA, 760 bp, Rattus norvegicus
  Genbank Accession No. NM_057099
gcggccgccttagctgttcgtggagccgtctctgcaccggcctttgggccggaggcgctcactccagactgggaaaaccgagaagtctccacagggaccacgatcatggctgtgcaatttgacgggggcgtggttctaggagcagactccagaacaaccactgggtcgtacatcgccaatcgagtgactgacaagctgacccctatccacgatcacatcttctgctgccgctcaggctcggcagctgatacccaagcagtagctgatgctgtcacgtaccagcttggtttccacagtattgagctgaacgagcctccactagtgcacacagccgccagtctctttaaggagatgtgttaccgctacagagaagatctgatggcaggaatcatcatcgcaggctgggaccctcaagaaggagggcaggtgtactctgttcccatgggaggtatgatggtaagacagtcctttgccatcggaggctccgggagctcatatatctatggctatgttgatgctacctatcgggaaggcatgaccaaggatgaatgtctgcaattcactgccaatgctcttgctttggctatggaacgggatggctccagtggaggagtgatccgcttggcagccattcaacagtcgggggtagagcggcaggtgcttttgggagaccagatccccaaggtcaccatctccactttgccacctccctgaagcctaggattcccatcccgacgcacaagctaataaacagattgtc

SEQ ID NO: 3876 - DNA, 2573 bp, Rattus norvegicus
  Genbank Accession No. NM_057100
ccgggctcccggcccgggcctcgccatgccgccaccgcccgggcccaccgccgccctgggcactgcgcttctgctgctcctgctggcctccgagtcttcgcacactgtgctgttgcgggcgcgtgaggcggcgcagttcctgcggcccaggcagcgccgcgcctaccaagtcttcgaggaggccaagcagggccacctggaacgggagtgcgtggaggaggtgtgcagcaaggaggaggctagagaggtgttcgagaacgaccccgagacggactatttctatccaagatatcaagagtgcatgaggaaatatggccggcccgaagataaaaacccaaatttcgccacctgtgttaagaacttacctgaccaatgcaccccaaacccctgtgataagaagggcactcaactctgccaagacctcatgggcaacttcttctgcttgtgcaaagatggctggggaggccggctctgtgacaaagatgtcaacgagtgtagtcagaagaatgggggctgcagccaggtctgccataacaaaccaggaagcttccaatgtgcctgccacagtggcttctcacttcaatcagacaacaagagctgccaagatatagatgaatgcacagactcagacacctgtggggatgcgcgttgcaagaaccttccgggctcctactcctgcctctgcgacaaggggtacacttacagctccaaggagaagacctgccaagatgtggatgagtgccagcaggaccgttgtgagcagacctgtgtcaactccccaggcagctatacctgccactgtaatgggcgcgggggcctaaaactgtccccagacatggatacctgtgaggacatcttaccgtgtgtgcccttcagcatggccaagagcgtcaagtccttgtacctgggccgcatgttcagcgggacccccgtgattagactacgcttcaagaggctccagcctaccaggctgctggccgaatttgacttccgtacttttgaccctgagggagtcctcttcttcgccggaggtcgctcggatagcacctggatcgtcctgggcctcagggctgggcgacttgagttgcagctacggtacaatggcgttggacgcatcaccagcagtgggccaaccatcaaccacggcatgtggcaaacgatctctgtggaagaactggaccgcaaccttgtcatcaaggtcaacaaagatgccgtgatgaagattgcggtggctggggggctgttccagctagagagaggcctgtaccacctgaatctcactgtggggggcattcccttcaaggagagtgacctcgtccagccgattaaccctcgcctggacgggtgcatgaggagctggaactggctgaatggggaagacagtgccattcaggaaacggtcaaggccaatacaaaaatgcagtgcttctctgtgacagagaggggctccttcttcccggggaatggatttgccttctatagcctcaactacacccggacatcgctggatgtcggcacggaaaccacctgggaagtagaagtcgtggctcgcattcgccctgccactgacacgggggtgctgatggcactggtgggggacaaagacgtcgtcctcctctctgtggccctggtcgactaccactccacaaagaagctcaagaagcagctggtggtcctggcagttgagaatgttgccctggccctgatggaaatcaaggtgtgcgacagccaggaacacactgtcactgtctccctgcgggatggcgaggccaccctggaagtggatggtaccaagggccagagcgaagtgagcaccgcacagctgcaggagcgactggacctgcttaagacacgtctgcaaggctccgtgctcacctttgtggggggcctgccagatgtacaagtgacttccacacccgtcacggcgttctaccgtggatgcatgactctggaggtaaacgggaagaccctggacctggatacggcctcctacaagcacagtgacatcacctcccactcctgcccgcctgtggagcacgtcacagcctagaccgagctgcaagagttctctacacctaaaagacacggtgaagcagggtcagggacacacagcaccatctcctctcgcatgggccctgcaacactggagcaggtgcagggctacgatgggtactacgtactgtccgtggagcagtaccccgagctggctgacagtgccaacaacatccagttcctgagacaaagcgagatcggcaagaggtaacccccgggccacccctgcgcagattctcctgtagcacaaaccgaaccggactctccaaagagccttccagaatgacactgctctgcagacaccctcggcgcagacacaggcaacacaaaccagaaacaaagacgactttttttttctctaaatgaccttaaaggtgatcggctttaaagaatatgtttacatacgcatatcgctgcactcaattggactggaagtatgagaaggaaaaaaaagcattaaaaaggcaacgttttgccatgaccctctgtaccttcgaggcactgtatttaacaaaagtttt

SEQ ID NO: 3877 - DNA, 1964 bp, Rattus norvegicus
  Genbank Accession No. NM_057101
ggttgggccatgctgctacctgggctgctgttgctgctgctgctgctgctgctagctggcacccgctggctgtggggtcagtggaagctctggaaactccgcctcccgcctctggccccggggtttctgcactttctacagcccaaccttccggtctacctgtttggcctggctcagaaacttgggcccatctacaggatccgcttggggctacaagatgtggtggtgttgaactctaacaaaaccattgaggaggccttgatccaaaagtgggtggactttgctggccgaccccagatactagatggaaagatgaactttgacctctccatgggggattattctctaacatggaaagcccacaagaaactctctcgttcggccctggtgctgggcatgagagactccatggaacctctggtagagcagctgacccaggaattctgtgagcgcatgagagcccaggccggtgcctctgtggccatccataaggaattctccttactcacctgcagtatcatcagctgtctcactttcggagacaagcaggacagcactttgctgaatgccactcacagctgtgtccgggacttgctgaaagcctggaatcactggtccgtccaaatcttggatataattccctttctcaggttcttccccaatccaggcctctggaaactgaagcagttccaggagagtagggaccatatcgtaatgcaggagctgaagaggcacaaggacagcctggtggcagggcagtggaaagacatgattgactacatgctccagggtgtggagaagcaaagagatgccagagacccagggcagctccacgagcggcacgtgcatatgtcggtggtggacctttttgtcggtggcacggagaccacggctgccacgctctcctgggctgtggctttcctgcttcaccaccctgagatccagaagcggctgcaggaagaattagacctcaagctggcccccagctcccagctcctgtacaagaaccgaatgcagctacctctgctcatggccaccattgctgaagtgctgcgtttgcggcccgtggtgcccatggccttgccccatcgtgcaactaaggctagcagcatctctggctatgatatccccaaggatacgatcatcatccccaacatccaaggcgccaacctggatgagatggtttgggaactgcccagcaagttctggcctgatcgcttcctggaatccggcaagagtcccagaataccgacctttggctgtggggcacgcgtgtgcctgggcgagcctctggcgcggctggagttcttcgtggtgctggctcgcctgctccagaccttcacgctgctgccgccaccagatggtaccctgccctccctgcagcccctgccgtatactggcatcaatctcttaattcctcccttccaggtgcggctgcagcccaggaacctggcaccccaagaccagggccagaaatcctcgacaggataggacgagccttgtgcctcagtttctcctttattgctccattcccctcccctcccccctgtaaacatggtgctgtgagactgtggcagagaaggcttcctcggtgagctaggcacagtagagacacactggctcttctctgggcacaacccctcagtgctcggcagtcataccagggtgtgagtgaggtgggcagcaggctcaggtgcccctggtgggggcctggaagtttctgggtctcagcttcatttccgtgaagggcaccgagaactcgaagcccttccagtggtaccagctcactccctgagggaagggttgtcaagggaggagagtcaagacaacgccacatctatgccaccttatccatcccaaccctggctcctctaggtgactcccagagtgcagccatctccccccatgatccctgaagtgatgtcctctcccacccgctaataaacggtcttttcaagattccc

SEQ ID NO: 3878 - DNA, 3216 bp, Rattus norvegicus
  Genbank Accession No. NM_057104
ggtacccaacagcctgaactcagagccccgagagcagagcattcagggcaagcagaaacaccctgcagaggctttccaagaatccctcggcatggcaagacaaggctgtctcgggtcattccaggtaatatccttgttcacttttgccatcagtgtcaatatctgcttaggattcacagcaagtcgaattaagagggcagaatgggatgaaggacctcccacagtgctgtctgactctccatggaccaacacctctggatcctgcaaaggtagatgctttgagcttcaagaggttggccctccagactgtcggtgtgacaacctgtgtaagagctacagcagctgctgccacgatttcgatgagctctgtttgaaaacagtccgaggctgggagtgcaccaaagacagaagtggggaagtacgaaacgaggaaaatgcctgtcactgcccagaagactgcttgtccaggggagactgctgtaccaactaccaagtggtctgcaaaggagaatcacactgggtagatgatgctgcgagaaatcaaagttccgaatgcctgcaggtttgtccgcctccgttaatcatcttctctgtggatggtttccgtgcatcatacatgaagaaaggcagcaaggttatgcccaacattgagaaactgcggtcctgtggcacccatgtcccctacacgaggcctgtgtaccccacaaaaaccttccctaatctatatacgctggccactggtttatatccggaatcccatggaattgtcggtaattcaatgtatgatcctgtctttgatgcttcgttccatctacgagggcgagagaagtttaatcataggtggtggggaggccaaccgctatggattacagccaccaagcaaggggtgagagctggaacattcttttggtctgtgagcatccctcatgaacggaggatcctaaccattcttcagtggctttctctgccagacaacgagaggccttcagtttatgccttctactcagagcagcctgatttttctggacacaagtacggcccttttggccctgagatgacaaatcctctgagggagattgacaagaccgtggggcagttaatggatggactgaaacaactcaggctgcatcgctgtgtgaacgttatctttgttggagaccatggaatggaagatgtgacatgtgacagaactgagttcttgagcaactatctgactaatgtggatgacattactttagtgcctggaactctgggaagaattcgagccaaatctatcaataattctaaatatgaccctaaaaccattattgctaacctcacgtgcaaaaaaccggatcagcactttaagccttacatgaaacagcaccttcccaaacggttgcactatgccaacaacagaagaattgaagacatccatttattggtcgatcgaagatggcatgttgcaaggaaacctttggacgtttataagaaaccatcaggaaaatgttttttccagggtgaccacggctttgataacaaggtcaatagcatgcagactgttttcgtaggttatggcccaacttttaagtacaggactaaagtgcctccatttgaaaacattgaactttacaatgttatgtgcgatctcctaggcttgaagcccgctcccaataatggaactcatggaagcttgaatcacctactgcgtacaaatacctttaggccaaccatgccagacgaagtcagccgacctaactacccagggattatgtaccttcagtccgagtttgacctgggctgcacctgtgacgataaggtagagccaaagaacaaattggaagaactcaataaacgtcttcataccaaaggatcaacagaagctgaaaccgggaaattcagaggcagcaaacatgaaaacaagaaaaaccttaatggaagtgttgaacctagaaaagagagacatctcctgtatggacggcctgcagtgctctatcggactagctatgatatcttataccatacggactttgaaagtggttatagtgaaatattcttaatgcctctctggacatcgtataccatttctaagcaggctgaggtctccagcatcccagaacacctgaccaactgtgttcgtcctgatgtccgtgtgtctccaggattcagtcagaactgtttagcttataaaaatgataaacagatgtcatatggattcctttttcctccctacctgagctcctccccagaagctaagtatgatgcattcctcgtaaccaacatggttccaatgtaccccgccttcaaacgtgtttgggcttatttccaaagggttttggtgaagaaatatgcttcagaaaggaatggagtcaacgtaataagtggaccgatttttgactacaattacgatggcctacgtgacactgaagatgaaattaaacagtatgtggaaggcagctctatacctgtccccacccactactacagcatcatcaccagctgcctggacttcactcagcctgcagacaagtgtgacggtcccctctctgtgtcttccttcatccttcctcaccgacccgacaatgatgagagctgtaatagctccgaggatgagtcgaagtgggtagaggaactcatgaagatgcacacagctcgggtgcgggacattgagcacctcactggtctggatttctaccggaagactagccgtagctattcggaaattctgaccctcaagacatacctgcatacatatgagagcgagatttaactttctgggcctgggcagtgtagtcttagcaactggtgtatatttttatattgtgtttgtatttattaatttgaaccaggacacaaacaaacaaagaaacaaacaaataaaaaaaaaaaccacttagtattttaatcctgtaccaaatctgacatattaagctgaatgactgtgctattttttttccttaattcttgatttagacagagttgtgttctgagcagagtttatagtgaacactgaggctcacaatccaagtagaagctacgtggatctacaaggtgctgcaggttgaaaatttgcattgaggaaatattagttttccagggcacagtcaccacgtgtagttctgttctgttttgaaagactgattttgtaaaggtgcattcatctgctgttaactttgacagacatatttatgccttatagaccaagcttaaatataataaatcacacattcagatttt

SEQ ID NO: 3879 - DNA, 1593 bp, Rattus norvegicus
  Genbank Accession No. NM_057105
atggcttgccttcttcctgctgctcgacttcctgcaggctttctcttcttagtgctctggggctcagttctaggtgacaagctgctggtggtcccccaggatggcagccactggcttagcatgaaggagatagtggagcacctcagtgaacgcggacacgacattgtggtgctagtgccagaagtcaatttgcttttgggagaatccaaatactacaggaggaaaagcttcccggtcccctacaacctagaagagttgcggacccgctatcgctcctttgggaacaaccactttgctgccagttcccccctgatggctcctctaagagagtacaggaacaacatgattgtcattgacatgtgctttttcagctgccagagcctcctgaaggactcggccaccctcagcttcctcagggagaaccagtttgatgctctgttcacagacccggccatgccctgtggtgtgatcctggctgagtatctcaagctgccttccatctacctcttcagaggtttcccatgctctctggagcacatgcttggtcaaagcccaagccccgtatcctatgttcccagattctacaccaaattctcagaccacatgacatttccccaacggctggccaacttcattgctaacatcttggagaactacctttatcattgtctgtactcaaagtatgagatccttgcctcagacctcctcaagagagatgtgtccctacctgccttacaccagaactctctgtggctgttacggtatgattttgtgttcgaatacccccggccagtcatgcccaacatgatcttcattggagggaccaactgcaagaagaaggggaacctgtctcaggaatttgaagcctatgtcaacgcctccggagaacatggcatcgtggttttctctttgggatccatggtctcagagattccagagaagaaagcgatggaaatcgctgaggctttgggcagaattcctcagacggtcctgtggcgctacaccggaactagaccatcgaaccttgcaaagaacactattcttgtcaaatggctaccccaaaacgatctgcttggtcatccaaaggctcgggcgttcatcacacactccggttcccatggtatttatgaaggaatatgcaatggggttccaatggtgatgatgcccttgtttggtgatcagatggacaacgccaagcgcatggaaactcggggagctggggtgaccctgaatgtcctggaaatgactgccgatgatttggaaaacgcccttaaaactgtcatcaataacaagagttacaaggagaacatcatgcgcctctccagccttcacaaggaccgtcctatcgagcctctggacctggctgtgttctgggtggagtacgtgatgaggcacaagggggcgccacacctgcgccccgccgcccacgacctcacctggtaccagtaccactccttggacgtgattggctttctcctggccatcgtgttgacggtggtcttcattgtctataaaagttgtgcctatggctgccggaaatgctttgggggaaagggtcgagtgaagaaatcacacaaatccaagacccactga

SEQ ID NO: 3880 - DNA, 882 bp, Rattus norvegicus
  Genbank Accession No. NM_057114
ggctcacggttggttctgtttgtgagacctgtagctcgactctgctgatagcaagatgtcttcaggaaatgcaaaaattgggcatcctgctcccagcttcaaagccacggctgttatgccggatggacaattcaaagatatcagcctaagtgattacaaaggaaaatatgttgtattctttttttaccctcttgactttacttttgtgtgtcccacggagatcattgctttcagtgatagagcagaagaatttaagaaactcaactgccaagtgattggagcttctgtggattctcacttctgtcatctggcatggattaacacacccaagaaacaaggaggattgggacccatgaacattcccttggtatcagatcccaagcgcaccattgctcaggattatggagtcttaaaagctgatgaaggtatctctttcaggggcctctttattattgatgataaaggtatccttcgccagataacaataaatgatcttcctgttggccgctctgtggatgagattctgagactagtccaggccttccagttcactgacaaacatggtgaagtgtgcccagctggctggaaacctggcagtgataccatcaagcctgatgtcaataagagtaaagagtatttctctaagcagaagtgagcactggaccagttttctggcagacagctttgagcagccagaagaaatttgtactctacacatgacgtggtgtgattccagataagcctttcctacaagggctaggggtggttagcctttcttccactattggtaaggggcagaccatcttatatcagtcacagaaaccaacctgttaattctctctctctcttttttttttttaagtatctattaaacgtgaattc

SEQ ID NO: 3881 - DNA, 1978 bp, Rattus norvegicus
  Genbank Accession No. NM_057119
gtggtgcggagcgagtcgactttggactactctcttagcgtggcgtcgcgcgaggctgcggcggagcctctgtcaggaaggcgggagcttgacagcttcagtaaagaccagcagcggtgacagcaacccggagtcatgagcgacagcggcgagcagaactacggcgagcgggaatcccgttctgcttcccgaagtggaagtgctcatggatcggggaaatctgcacggcacacacctgcaaggtctcgctccaaggaagattcaagacgttctagatcaaagtcaagatccagatctgaatctaggtctagatccagaagaagttctagaaggcattatacaaggtcacgatcacgatctcgctctcatagacgatcccggagcaggtcttacagccgagactatcgcagacgccacagccacagccattctcccatgtctactcgaaggcgtcatgttgggaaccgggcaaatcctgaccccaactgttgtcttggagtgtttggattgagcttgtacaccacagaaagagatctaagagaagtgttctctaagtatggccccattgctgatgtgtctattgtgtatgaccagcagtctagacggtcaagaggatttgcctttgtatattttgaaaatgtagatgatgccaaggaagctaaagaacgtgccaatggaatggagcttgatggacgtcggattagggtcgatttctctataacaaaaaggccccataccccaacaccaggaatttatatggggagacccacttatggcagttcacgacgccgggactattatgaccgaggatatgatcggggttatgatgaccgggactattacagcagatcatacagaggaggaggtggaggaggaggtggatggagagcagctcaagatagagatcagatttacagaaggcggtcaccttctccttactacagtcgtggaggatacaggtctcgttctcgatcaagatcctactcacctcgtcgctattaaagcatgaagttgaagactttctgagacctgccatagagctgggatgttgtttgtggacaatattttctattgtctcctgtttaaaaagtgaacagtgcctagtgaagttaggtgacttttacaccttttatgatgactacttttggtggagttgaaatgctgttttcattctgcatttgtgtagttcggtgctttgttcaaagttaagtgttttcagaaaagtatgttttgcatgtatttttttacagtccaaattttgactgctgagaagtttctattgtacaaaacttcatttaaaaggtttttctactgaatccagggtattctgaagatcgaagcctgtgtgtaaaatgctaccagatggcaaaaagcaacaataaacaagtttgatttttacttttctttctaaatatcaatgcttaacaagaaccattcttaagttatcagtaaaaaataaataaataaaaattttctttcaggagtccatgaaacttgccatattcgatatacctgcaattaagtgttaaaaatacgctgtaactctgtactgctagtattagaacaagaatctttccatacagctaatgcttaatgcttacattaatgtggatttgtcggcctttatgtaatctgtattatatatagcaggggataagagctacagatagatacatgcctttaaaaggctgtttcttaaggctgttacaaggagataatggtatttcaactaatcagcaagtgacaatacattccaccacaaatgtactcttgttcttctagcctttagactatgaaaatactgggtgcttcaaagtatggaatgagagaagggatcaccacacctgtgtcatggatgaagactgcctgttcattttttaaatatgattttcaggtcctttgcttaccaaaggaagcccaattcactcaaatgttttgagaactgtttaaataaacaagcaagaaaaattgctgatgc

SEQ ID NO: 3882 - DNA, 3169 bp, Rattus norvegicus
  Genbank Accession No. NM_057125
cggctccagtctccctcgccatggcgcttgctgtattgcatgtcctagaacccttcccgactgagacaccaccgttggcggtgctgttgccgcccgggggcccgtggccagtgaccggggtaggcctggtgctggcgctacggccggcgagcgaaagtcctgcgggacccgcgctgctcgtggcggccgtggaagggtccggcgcccaatgcgagcagcgagggcccgggcctccgccgctgctggtgagccgcacgctgctgcgggtcctagcgctgagccccggagcgagagtgcgagcgcggcctgtgcggcggcctccagccttgggctgggcgctgcttggcacgtctccgggtcctgggcttgggcctcgagtcgggccgctgctggtgcgtcgcggggagacactaccggtgcccggttctcgagtgttggagacgcgaccggccttgcaagggttgctgggcccggggacacggctagctgtaactgagctccaggggcggaccaaactggacccggagagtagggaccacaaccatcccccacccccgcccgtagtttcctcctttgcagtttcccactcaatccggcagctccgaggagttctgggagggactggagatgcactaggtgtgagccggagctgtctccggagtctcgggctcttccagggcgaatgggtatgggtggcccgagtcggagagttaccaaacacctcccagccgcacttggctcaagtacaggttctagagcctcgctgggacctgtccgcgagactgggacccaactctgggcagccgggagagccactcgcggacggactggtgtttgtgcctgccactctagcttttaatctcggctgtgaccccctggaagtgggagagctcagaattcagaggtatctggaagactctactgctgctgaggacaaaggaagctgctcactactgcctgggcctccgtttgctcgagagttacacatcgaagttctgccctcgcctcactgtggtgtcaatgggaaatatgaccatgttctctaccagcacttccacacgcccagggtggtccaggaaggggatgttctgtgtgtgtcaacggctgggcaagttgagatcctggaaggaagcctggagagactgcccaggtggcgggaggtgtttttcaaagtgaagaaaacggttggagaagccccagatgggccagccagtgccttcctggccgataccacacacacctctttatacctggctggtaccaccctgagtcgtgtccccccgctgccttcaggaaggtccccaccctgggacagcttgtctcctccaggcctggaggccttggtaaatgagctgtgtgctgtcctgaagcctcatctgcagcccggaggaacactgctcacaggaaccagctgtgtgctcctgcagggtcccccaggcagcgggaagaccaccgcggtcacagctgcatgcagtcgcctcgggctccatctgctgaaggtgccttgctccagcctctgtgcagatagcagtaggactgtggagacaaagctgcagaccaccttctcccgggcccgccgctgcaggcctgtggtcctcctgctgacagccctggaccttctgggccgggaccgagatgggctgggtgaggatgcccgcgttgtggccacactgcgtcacctcctcctcgatgaggaccctctgagcaggtgccctcctctcatggtggtggccactacaagccgtgtccaggacctgcccaccgatgtgcggacggcatttcctcatgagctggaggtgccagtgttgtctgagagtcagcggctcagtgtcctgcaggccctcactgcccatcttcccttgggccaggaggttaacctgtcacagctggcacggcgctgtgcgggctttgtggtaggggacctctatgcccttctgacccatgccagccgggcagcctgcaccaggatcaaagctgcaggcttggcgatgagtgaggaggatgagggggagctgtgtgccgctggctttcccctgttggccgaggacttcgggcaggcgttagatcaactacaaacggctcactcccaagcagtaggagcgcccaagatcccttcagtgtcctggcacgatgtgggtgggctgcaggatgtgaagaaggagatcctggagaccatccaactgcctctggaacaccctgagctgctaagcctgggcctaagacgatcaggccttctgctccatgggcccccaggcactggcaagaccctgctggccaaggcggtagccactgagtgcagcctcacctttctcagtgtaaaggggccagaactcatcaacatgtatgtgggccaaagtgaggagaatgttcgggaagtgtttgccagggccagggctgctgccccgtgcatcatcttctttgatgaactggactccttagctccgagccgtggacggagtggagactctggaggtgtgatggacagagttgtgtctcagctcttagctgagctggacgggcttcacagcactcaggatgtgtttgtgatcggagccaccaacagaccagacctcctggatcctgcccttctgcggcctggcagatttgacaagctggtgtttgtaggagcaagtgaggaccgggcctcccagctgcgcgttctgagcgccatcacacgaaagttcaagctggaggcctctgtgagcctgatgaatgtgctggattgctgcccgcctcagctgaccggcgcagacctctattctctctgctctgacgccatgatgaccgccctcaaacgcagggtccgagacctagaggaagggctggagcctcggagctcagcactgttgctcaccatggaggacctgttgcaggccgcagcccggctgcagccctcagtcagcgagcaggagctgctgcgatacaagcgtatccaacgcaagtttgctgcctgctaggagcttcctgccgcctgcaaaagcccacctggctggaggtagctgccacctgccacctgaaggctgcctccctccaggagataccctgagatccctagtgggaggcccttgtgcccaggagaagaggcagggctggcagcttgggggcgtggcagcctggaatgggcattgaggccccagttctcagacagaaaataaagtctatactgccc

SEQ ID NO: 3883 - DNA, 1612 bp, Rattus norvegicus
  Genbank Accession No. NM_057131
gccattttgctgtaagacgctgtgcggagctctgagctctttttccttcggacagccgaggcctggcgggccgggctggggtcgggaccaggaagaataacagagaggttaacagaatacaggataacaggagaataacaggaggttgtccataattgactttaagcagcaaacagtaaaacactgagctcttcagctccgcctttcttgctcttagaattggaacgccaagaaggttttgatgttttgtgtggcgcctcctgaattagaaaccaagatgaacataaccaaaggaggcctcgtgttgttttcagcaaattccaattcatcatgtatggagctttcaaagaaaattgcagagcggctgggggtggagatgggcaaagtgcaggtttaccaggaacctaacagagaaacacgagttcaaatccaggagtctgtgagagggaaagatgtatttatcattcagaccgtctcgaaggacgtgaacaccaccatcatggagctcctgattatggtatatgcatgtaagacctcttgtgccaagagcatcattggagtgatcccctactttccttatagcaagcagtgcaagatgagaaaaaggggctctattgtctcaaaattgctggcttctatgatgtgcaaagctggtctgactcatcttatcactatggatttacaccagaaggaaatccagggcttcttcaatattccagtggataatttaagagcctcccctttcctgttacagtatattcaagaagagatcccagattataggaatgcagtcatcgtggccaagtctccagcctcagccaagagggcacaatcttttgcagagcgtctacgcctggggatcgcagtgatccatggagaagcacaggatgctgagtctgacttggtggatggccggcactccccaccaatggtcaggagtgtagctgccatccaccccagcctggagatcccaatgctgattcctaaagaaaagcccccaatcacagttgttggtgatgttggaggaagaattgccatcatcgtggatgacattattgatgatgtggacagctttcttgctgcagcagagaccctaaaggaaagaggtgcatataagatctttgtgatggcaactcacggcttgttatcctctgatgctccccggctgattgaagagtctgccattgatgaggtggtggtcactaacacgatcccacatgaaatccagaagttgcagtgccccaagatcaagactgtggacatcagcatgatcctctcagaagccatccgccgaattcacaacggggagtccatgtcctaccttttcagaaacataggcttagatgactgaacagttctcctatggcagaactcccacaggtcaagtgggaggcccagcatatatgctggaaggcccatgcccagctagatacttgaccctcccttcctgacatcttcctgattgattcctgtgaaggtacaaggaccagctttcttaatgttggtttaggtttttgtgagtttgggggataatttttataacagaaagacctctttttaaataaaagaagttaaaacctaaaaaaaaaaaaaaaaaaaaaaaaataaaaaa

SEQ ID NO: 3884 - DNA, 1111 bp, Rattus norvegicus; identical to SEQ ID NO: 2874
  Genbank Accession No. NM_057133

SEQ ID NO: 3885 - DNA, 1071 bp, Rattus norvegicus
  Genbank Accession No. NM_057137
gcaagccagtgttaggaagtcgccccgtgatcgcgccgccttgggtttttctgttctttttttctctgtttatgtgcaaagctgccagcagcccatagaaacatgaccaccaatatgctccccttacacccgtactggcccaggcacctgagactggacaacttcgtgcctaatgacctcccgacttggcatatcctggttggcctattctccttctctggggtcctaattgtgatcacgtggctgttgtctagccgagtttctgttgtcccacttggaactgggcgtcgactggccctgtgctggtttgctgtgtgcacattcattcaccttgtgatcgagggctggttctctttctaccatgaaatccttctcgaagaccaagccttcttatcccaactctggaaagaatattccaagggagacagccgatatatccttagtgatggcttcatcgtctgtatggagagtgtcacagcttgtctctggggaccactcagcctatgggtggtgatcgcctttctccgtcatcaacccttccgctttgtcctacagcttgtggtgtctgtgggccagatatatggggatgtgctgtacttcctgaccgagctccgcgatggattccagcatggagagctaggtcaccccctttatttctggttttacttcgttatcatgaatgccatatggttggtgataccgggcatccttgtgtttgatgccatcaagcatctcacaaacgctcagagcatgctggacaacaaagtcatgaaaattaagagcaagcataactaaagagacggagagtgagctgagacctgtctgaggaggcgctctccccgcttaccagaagactcgaatcctcctcctcctcttcctccttctcctcgaacagttttggagggtcagagctatgggatttgccacactcaaagggccagagtcagaaaaggtagggaacatgcggagctactgccagggaccatagagaaagggtggaagagaagatgggaagtccctgtccaaaaccaggaaataaaacgtctttaactataaaaaaaaaaaaaaaaa

SEQ ID NO: 3886 - DNA, 3563 bp, Rattus norvegicus
  Genbank Accession No. NM_057139
tctagatccaacaatggaaaatctacatctacaatctcacttggaagagagtcaagaagccccttccttttgcgcacagaagaacaaattacaacaatcacacgatcagaacagaatccatcagtagatgctgccccagtgggacgacagaggaaagaaaagagactgacagacaccaggaaggaacaaggcagagctaggcccaaccaacagggagagcatgaaccctgggaaacagacattcggagtgaggatctcccaagaatcctgtctccgtgccttcattaaatcagggttcaccataggaatgctgtggccagctaggaacaaaagcatatcggcagagatgggaggaagtgggaggaagtgggaggctagagggacgtaaataaaaaaccaacagaaagaacaaaaacatacatttagggagaaactggaaggggaccgacggggacagtggcgaggtaggtgatggacggaggcacggtgtcctggtgtgggaggaattggcgccgttcgacaccaggcgggtccgttctgcagcagcactcagctatctccagcagcagccgccgcccgggccgaccagcagccgccgccacaggccgagggagccagcagtcagcggtgaacccgggccctcaccatgagttcttcgcctgttaatgtcaagaagctgaaggtgtcggagctgaaggaggagctcaagaagcggcgcctctcagacaagggcctcaaggccgatctcatggatcgactccaggccgcgctggacaacgaggcaggaggccgccccgccatggagcccgggaacggcagcctcgacctgggtggcgatgcggccgggcgctcgggagcaggcctagagcaggaggccgcggccggcgccgaagacgatgaggaggaggagggcatttccgctctggacggcgaccagatggagctgggcgaggagaacggggcggcgggggcggctgacgcgggcgcgatggaggaggaggaggcggcgtcggaagacgagaacggcgacgaccagggcttccaggagggggaggacgagctcggcgacgaagaggagggcgcgggcgacgagaacggccacggggagcagcagtcccaaccgccggcggcggcgcagcaggcttctcagcagcgcgggcctggcaaggaggccgcggggaaaagcagcggccccacctcgctcttcgcggtgacggtggcgccgccaggggcgaggcagggccaacagcaggcgggaggagacggcaaaacagaacagaaagctggagataaaaagagaggtgttaaaagaccccgggaagatcatggccgaggatattttgagtacattgaagaaaacaagtacagcagagccaagtctcctcagccacctgttgaagaagaagacgaacacttcgatgacacagtggtttgtcttgatacttataattgtgatctgcattttaaaatatcaagagaccgtctcagtgcttcttcccttactatggagagtttcgcttttctttgggctggaggaagagcttcttatggtgtgtcaaaaggcaaagtctgctttgagatgaaggtaacagagaagattccagtaagacatttatatacaaaagatattgatatacatgaagttcggattggctggtcactaaccacaagtggaatgttgcttggtgaagaagaattttcttatgggtattctctgaaaggaataaaaacctgcaactgtgagacagaagattatggagagaagtttgatgaaaatgatgtgattacgtgctttgctaactttgagactgatgaagttgaactctcttacgcaaagaatggacaagatcttggtgttgcctttaagattagtaaggaagttcttgctgaccggccattattcccccatgttctctgccataactgtgcagttgagtttaattttggtcaaaaggaaaagccatactttccaatacctgaagactgtacttttatccaaaatgtcccattagaggaccgagtcagaggaccaaaaggacctgaagagaagaaggattgtgaagttgtgatgatgattggcttgccaggagctggaaaaactacctgggttactaaacatgcagctgaaaaccctgggaaatataacattcttggaacaaacactattatggacaaaatgatggtggcaggctttaagaagcaaatggcagatactggaaaactgaacacactgttgcagagagccccacagtgtcttggcaagtttattgagattgctgcccgaaagaagcgaaattttattctggatcagacaaatgtgtctgctgctgcccagaggagaaaaatgtgcctgtttgcaggcttccaacgaaaagccgtggtcgtttgcccaaaagacgaagactataagcagaggacacagaagaaagcggaagtagaggggaaagacctaccagagcatgctgtcctcaagatgaaaggaaacttcacccttccagaggttgcagagtgttttgatgaaataacctatgttgaacttcagaaggaggaagcccagaagcttttggagcaatataaagaagaaagcaaaaaggcactgcccccagaaaaaaagcaaaacactggctcaaagaaaagcaataaaaataagagtggcaagaaccagttcaacagaggtggtggccatagaggacgtggaggattcaatatgcgtggtggcaatttcagagggggagctcctgggaatcgtggtggatataataggagaggcaacatgccccagagaggtggtggcggcggaagtggtggaattggctatccatacccgcgtggccctgtctttcctggccgaggtggttactcaaacagaggaaattacaacagaggtggaatgcccaacagagggaactataaccagaacttcagaggacgaggaaataatcgtggctacaaaaatcaatctcagggctacaaccagtggcagcagggtcaattctggggtcagaagccatggagtcagcattatcaccaaggatattattgaatacccaaataaaacgaactgatacatatttctccaaaaccttcacaagaagtcgactgttttctttagtaggctaactttttaaacattccacaagaggaagtgcctgcgggttccttttttagaagctttgtgggttgatttttttttcttttcttttttgtacatttttaattgcagttttaaagtgaatcgtaagagaacctcagcattgtgcacgataagagaatgtgtcagtatttcagggttctacattttatctgtaaaatgtgactttttttttatcacaacaaaagtaaaatgttgctttgtacctggtgtcttttattaagcatttactctcccatttctcacagagaataacagtcgggagtcattgtcacaatgaaatagcaatgtcagcaaccagattcatggaaggactgagggtcctcatgaatggcattaagattctgtactgctcataatacactccatcctctctagatggccgggcaatagtggaggggtaatctctgac

SEQ ID NO: 3887 - DNA, 1097 bp, Rattus norvegicus
  Genbank Accession No. NM_057143
gtgccgagcacagttactggaaggcttaaccaaagttttgatgcctgggaaccgcgcaggaaaaacacgcggaacgtgcttcacagtggcggctaactgctctcgttcgctgtgcagagccgtctggcagggttgacctcctaaagggatattccatctttattaatcattagtagtgtggtcagagacttagcaccattggtctcccccaacctggtccagacatttcagcagtttatcggaacagcaacaacagcaacaaaaccttcaaaatttacaagtctttaagaaatagaaatggcatccaaaagagctctggtcatcctagccaaaggagcagaggagatggagacagtgattcctgtggacatcatgcggcgagctgggattaaagtcaccgttgcaggcttggctgggaaggaccccgtgcagtgtagccgtgatgtagtgatttgtccggataccagtctggaagaagcaaaaacacagggaccatacgatgtggttgttcttccaggaggaaatctgggtgcacagaacttatctgagtcggctttggtgaaggagatcctcaaggagcaggagaacaggaagggcctcatagctgccatctgtgcgggtcctacggccctgctggctcacgaagtaggctttggatgcaaggttacatcgcacccattggctaaggacaaaatgatgaacggcagtcactacagctactcagagagccgtgtggagaaggacggcctcatcctcaccagccgtgggcctgggaccagcttcgagtttgcgctggccattgtggaggcactcagtggcaaggacatggctaaccaagtgaaggccccgcttgttctcaaagactagagagcccaagccctggaccctggacccccaggctgagcaggcattggaagcccactagtgtgtccacagcccagtgaacctggcattggaagcccactagtgtgtccacagcccagtgaacctcaggaactaacgtgtgaagtagcccgctgctcaggaatctcgccctggctctgtactattctgagccttgctagtagaataaacagttccccaagctcctgacggct

SEQ ID NO: 3888 - DNA, 2828 bp, Rattus norvegicus
  Genbank Accession No. NM_057155
ttcccttgatctactcatcgccagcatctggagacccaatggcccaagcctactggcaatgctacccctggcttgttctcctctgtgcatgtgcatggagttacccagggcctgagtcccttggaagagaagatgtgagagactgttcaaccaatcctccgcgcctgccagttactgctgtcaatacaacaatgcggcttgcagccctccgccagcagatggagaagtcgaatctctctgcctacatcatcccagacacggatgcacacatgagtgagtatattggcaaacatgatgagaggcgagcatggatttctggcttcacagggtctgcaggtactgctgtggtgaccaagaaaaaagcagctgtctggaccgatagtcgttactggactcaggccgagaggcagatggactgcaattgggaactccataaggaagttagcatttcgtcaattgtcgcctggatcttagctgaagtccctgatggagagaatgtgggctttgaccccttcctcttttctgttggttcctgggaaaattatgatcaagaactccaagactccaacagacaccttttatccattacaaccaaccttgtcgacgtggcatgggggtcagagaggcccccagtgccaagccaacccatttatgccctgccaaaagaatttacaggaagcacttggcaggaaaaagtatccgccatccgaagctatatgcagaaccacaccatggctccaactggggttcttctatccgcactcgatgagacagcctggctcttcaacctccgtagcagtgacatcccctataaccccttcttctactcctatacgctgctcacggactcttccatcaggttgtttgtcaacaagagtcgctttagcctggagaccctgcagtacctgaatacaaactgcacactacccatgtgtgtacaacttgaagactacagtcaaattcgtgatggtgtgaaagcctatgcttcaggcaatgtgaaaatcttgattgggatcagctataccacctatggggtctatgatgtgataccaaaggaaaaactcgtgacagagacctactccccagtgatgttaatcaaggctgtgaagaacagcaaggagcaggccctcttgaaagccagccatgtgcgggacgctgtggctgtgatccagtacttggtctggttggagaagaacgtgcccaaaggcacggtggatgagttttctggagcggaacacattgatcagttacgacggaatgaaaacttctcctctggacccagttttgaaaccatttctgctagtggcctgaacgccgccctggcccattacagcccaacaaaagagctgcaccgtaagctgtccttagatgagatgtacctggtggattctggaggccaatactgggatgggaccacagatatcaccagaacagtacactggggtactcctactgcctttcaaaaggaggcttacacgcgtgtgctgatgggaaacatcgatctgtccagacttgtctttcctgctgctacatcagggagagtggtggaagcctttgctcgaagagccttatgggaagttgggctcaattatggtcatgggacaggccatggcattggtaatttcctctgcgtgcatgagtggccagtggggttccagtataacaacatggccatggccaaaggcatgttcacttccatcgaacctggatactaccaggatggggaatttggaatccgtcttgaagacgtcgccctcgtggtagaagcaaagaccaagtacccagggacctacctgacttttgaattggtatcctttgtaccctatgaccgaaacctcattgatgtcagcctgctgtccccagagcagctccagtacctgaaccgctactaccagaccatccgtgagaacataggcccagaactgcagcgtcgccagctgctggaggaattcgcatggctggagcggcacacagagcccctgtcagccagtgcccctcataccacgtccttggcctctatgtgggtagcctctgcccttgccatcctcagctggagttgctagaggcccccaattctcctgttgactgttgggtttggggattcatttgcttctgctcagctgtcctctctcctgtgtcatacatgtcccacggggccctgatggctcagccactgtcctaaatgtcctccagagccagatcctaggtagcatattctaccttctcccagatgtgcatacctcatcatggacttccacccctgggccctggactagcagagccatatagcctgctacatgggatccctctctcccaaagtaaaggaccctatagggtaatacccctatttatagttcacagggctccatcccatctccactcactggagaaggccagggctattgccacccacactgactccagactttctaaagctgcctctggccacccttacctgcaggcctaccgtagcctgtttgctatctttggagaaggaggtgactgtgtattctggtctcaaactaccactctagtattagggagaacagaaaagctgaaagtcaactgtggcctgcaattgaacacctcagttgatgatgggtatcagtcctctccccaactgtgaacccacaactccttaactaccaatgcaccccttaacaagccaccacgcagggagttaaggcacaggacttagactgtgaagtagaagagagaatggaaaggtgttctgggctatcccagactcccctgacacttaatcttctaaggtgaagtcaccatgacagtgctattaaaccctctcatatctttaaaaaaagacgctt

SEQ ID NO: 3889 - DNA, 1660 bp, Rattus norvegicus
  Genbank Accession No. NM_057186
tgctggttctcggctgctccactgagctatggcgttcgtgaccaggcaattcgtgcgctccatgtcctcctcttcctctgcgtcggcggccgccaagaagatcctgatcaagcatgtgacggtcatcggcggcgggctgatgggcgccggcatcgcgcaggtagctgcagcaactggccatacagtagtgttggtggaccaaacagaggacatcctggcaaaatccaagaagggaattgaagagagccttaagagaatggcaaagaagaagttcacagaaaaccctaaggctgccgatgagtttgtggagaaaaccctgagctccctttcaaccagcaccgatgccgcgtccgtggtgcacagcacagacctggtggtggaggccattgtggagaacctgaagttgaagaatgagctattccagaggctggacaagtttgctgcagaacacaccatctttgccagcaacacgtcttctttgcagatcacaaacatagccaatgccaccaccagacaagaccgatttgctggcctccacttttttaaccccgtccccatgatgaagcttgtggaggtcattaaaacaccgatgaccagccagaagacatttgaatctctggttgacttttgtaaaaccttagggaagcatcctgtttcctgcaaggacactcctggatttatcgtgaaccgtctcttggtgccatacctcatagaagctatccggctgcatgagcgaggcgatgcatctaaggaagacatcgacaccgcaatgaagctgggagccgggtatcccatgggtccctttgagcttcttgactatgttggactggatactacaaagttcatcttagacgggtggcacgaaatggatccggagaaccccttatttcagcccagtccttccatgaataatttggtggcccagaagaagctgggcaaaaagaccggagaaggattttacaaatacaagtgatcccccctcggcagcatctccagccagccactggacaaggacaagcacgctctgcactgttgtttccaggcttgccgtgggctgctcagtggacccccccttgcagtctctctgacgtaatctcttggctagttacggtaatggggttcttccactgatatctaattctctagtttagtctgttctctgtgaatttttctgaaaagcagtataccctgggtgccttggagcaaacatctttttctctggaccttgccactttttgtaagaagcaatcattagccgcattcactcaggtctcctgaaaatgagtatgccgtgtttatcagcgttgaaccccaggggcaggcaccatggtgcctacagatgcacctgagaggccttgcgtgcctgggaacatttgtagcccgcagcctcgagccttagcctacattctgggcgtgacagaaaatgtcccgtcttttttactcctcatcaggacaggactcctggagttttgggcaagtacctgtgagcttggttcttggcccatcttcgtggccgttcggatcttaaccgtcactgtctgtctctctcatttcttcaggagaaatcagtgctacaaagtgcctctgagctgactctactaaaatgcagtcttttaatctgtaaacattgggatgggaataaataaacgtatacgacttg

SEQ ID NO: 3890 - DNA, 1569 bp, Rattus norvegicus
  Genbank Accession No. NM_057194
agtgctggctcgcgtcatccagagtgagtccctctgcgaggctttagggagagctgtgcgacagctgcaccactagcaaggggttgggactcacgactgccaggagccagctgtccaccttgcagacctcagagcagaaggagcctcagtttaaatcatggagaagcacggaccaccagaacatgctgcttaccccattcctcaggctgactaccaagggtcccagggtccctatccaggaccgcagggtccatatccagggccccagggtccctatgcagggcctcaaggtccctatccagggccccagggtccctatgcagggccccaaggtccctatccagggccccaacctggctacccagttccaccaggcagttatgcaggtggtgacccaagtggctttcctgtccaacatcagccggcgtataatcacccaggtggacctgggggcaccccatggatgcaagcaccacctccacccctggactgtccgcctgggctggaatacttaacgcagatagatcagattctggttcatcagcagattgaacttctggaagtcttaacaggctttgaaacaaataacaaatatgaaatcaagaacagccttgggcagagggtttactttgcggtggaagatacggactgctgcactcgaaactgctgtggggcgtctagaccgttcaccttgaggatcctggataacatgggccgagaagtcatgactctggagagacccctgagatgcagtagctgctgcttcccctgctgcctccaggagatagaaatccaggctcctcctggggtgccagtaggttatgtgattcagacctggcacccatgtctgccaaagttcactctccaaaatgagaagaggcaggacgttctaaaggtcgttggtccgtgtgttgtgtgtagctgctgttcagacattgactttgagctcaaatctctagatgaggaatccgttgttggcaaaatttccaagcagtggtctggttttgtgagagaggccttcacggatgcagataacttcgggatccagttcccgctggacctggatgtgaagatgaaagctgtgatgcttggcgcttgtttcctcatagatttcatgttttttgaaagaactggaaatgaggaacaaaggtcaggagtatggtagtagtttcccaagattcctcggctgtaaggactgcatgccgatagacgctgagaggagatcaaggaatcaaaggaacgcaccatggcttcttttcctttactgaaataactttatatcaattaacctgtgatggctgtaggcccttttgtacaattgtgctctcaaattagagtttattttctgtaactctgtcatgtatttgtttttatacattcttaaggttgtcactgtgaatttgtgaaaaaaatatatgaatttatcaacatagaaatgatcttgtctatgaaaagaggctttgacttagtctttcattcattttcatttttatgaaaacttaaatatattgttatttaatataaagctacatattaaatgtaatttaatttaaaaaaaaaaaaaaaaaa

SEQ ID NO: 3891 - DNA, 1109 bp, Rattus norvegicus
  Genbank Accession No. NM_057197
gaattccctgctgcaaacatggcgctgctggcccgtgcgttctttgctggggtgtcccgcctcccctgcgatcccggtcctcagaagtttttcagctttggaacgaaaaccctgtatcaaagcatcgatgctccacagtctaaattcttcccacccattttaaagcctatgctaccacctaatgcctttcaaggaaaagtggctttcatcacgggaggaggcactggccttggcaaggcaatgacaactttccgctccagcctgggtgcccagtgtgtgatcgcgagcaggaatattgatgttctgaaagctactgcagaagagattacttctaaaactggaaataaggtctatgcgattcggtgtgacgttcgagatcctgatatggtacacaacacagtactggagctgatcaaagttgcagggcatcctgatgtggtgataaacaatgcggcagggaacttcatttctcccagtgagagactgtctcccaatggttggaggaccataactgacatagttctcaatggtacagcctatgtgacgatagaaattggaaagcagctaattaaagcacagaaaggagtcgcctttcttgctatcactacgatctatgctgagagcggatcaggctttgtaatgccaagttcttcagccaaatcaggcgtggaagccatgaataagtctcttgcagctgaatggggtagatacggaatgcgtttcaacataattcagccagggcctatcaaaaccaaaggtgcctttagccgtttggacccgactggaaaatttgagaaagatatgatcgagagaatcccctgtggtcggctgggaactgtggaggaacttgccaatctagcgactttcctttgcagtgattatgcctcttggatcaatggggcagtcattcgatttgacggtggagaggaagtgtttctgtcaggtgaattcaactctctaaagaaggtcaccaaggaggagtgggatgtaatcgaaggcctcatcagaaagacaaaaggctcctaagacgttcatggcttcctctgtgacaaactaaagtttagggactatatagatggacatttgagttaataaattttttgtctgat

SEQ ID NO: 3892 - DNA, 6004 bp, Rattus norvegicus
  Genbank Accession No. NM_057207
agctacccagatcaacggtgctctaccgctgaatcgctcgctgcggattttccacccaggccacaaccttcagtagaaggacaaacatcacagccagtgagctgccaagcagtgctccgaccgaccttgtcaaagagagcagctggtcccagttttagtcagcacctctcagcataagtgtctgggtcacagaaggagaacaggtcaacatttccaaagacatttaacacaccagcacaaaaggctacttaggttgtctttgtatgaatttggttgactagagaagtaaattaaaaaggtgctttgattgaagaagtcacatggacataatcaccatttcaacaatatattagatgatggttattggaacagcccaaacatttaccacagagcaagagatatagcttgagtggctactagactattccagaatcaaggaatggatgactacaggtatcgggacaactatgagggctatgcccctaatgatggctactaccggggcaatgagcagaacccggaagaagatgcacagagcgatgttacagaaggccacgatgaagaggatgagatctatgagggcgagtaccaaggcatccctcatccagatgatgtcaagtctaagcagactaagatggcaccgtccagagcagatggccttcggggccaggcagacctgatggctgagagaatggaagatgaggagcagctcgctcaccagtacgagaccatcattgatgagtgtggccatgggcgcttccagtggaccctctttttcgtcttggtcttggccttgatggctgacggagtggaagtgtttgtggtgagctttgctctgccaagtgcagagaaagatatgtgtctgtcaagttccaagaaaggaatgctcgggctgattgtctacctaggaatgatggcaggagccttcatcctggggggcctggctgataaactgggaaggaagaaggtcctcagcatgtccttggctatcaatgcttcctttgcctccctctcctccttcgtgcagggatatggagctttcctcttctgcagactcatctcaggcataggtattgggggctccctgccaattgtttttgcctacttttctgagttcttatcacgggagaaacgcggtgagcatctcagctggctgggtatcttctggatgactgggggcatctacgcatctgccatggcctggagcatcattccacactatggctggggcttcagcatgggaaccaattatcacttccacagctggagagtgtttgtcatcgtctgtgctctgcctgccactgtgtccatggtggccctgaagttcatgccagaaagccccaggttcctgctggagatgggcaagcatgatgaagcctggatgattctcaagcaagtccatgacaccaacatgagagctaaggggacccctgagaaggtgttcacggtttcccacatcaaaactcccaagcaaatggatgaattcattgagatccagagttcaacagggacttggtaccagcgctggttggtcaggttcatgaccattttcaaacaggtgtgggataacgccttgtactgtgtgatgggaccctacagaatgaacaccctgattctggctgtggtctggttcaccatggccttaagttactatggcctgacagtgtggttccccgacatgatccggtatttccaggatgaagaatataagtctaaaatgaaggtgttttttggtgagcacgtgcatggcgccacaatcaacttcaccatggaaaaccagatccaccaacatgggaagcttgtgaacgataagttcataaagatgtactttaagcatgtcctctttgaggacacattctttgacaaatgctattttgaagatgtgacatccacagatacttatttcaagaactgcaccattgaatcgactaccttctacaacacagacctctacaaacacaagttcattgactgtcggtttatcaattccacctttctggagcagaaggagggctgccacatggactttgaagaggacaatgattttctgatttacctcgtcagcttcctcggcagcctgtctgtcttgcctgggaacataatttctgccctgctcatggacagaatcggaagacttaagatgattggtggctccatgctcatctctgcagtctgctgcttcttcctgttttttggcaacagcgagtctgcgatgatcggctggcaatgcctgttctgtgggaccagcattgcagcctggaatgctctggatgtgatcacagtagagctgtatcccaccaaccagagggccactgccttcggcatcctcaatggactgtgcaaacttggtgccatcctgggaaacactatctttgcttcttttgttgggatcaccaaagtggtccccatccttctggctgctgcttctctggttggaggtggcttggttgcccttcgactgccagagactcgagagcaggtcctgatgtgaacagcaccgtggggagaggaagatgggaagatcttttttcaggacacttcagcacagccacacctcctgcctctcactgtccacaggacaccacggacagcacagaaggagaaatggactgtgtgatccctagtttaggacccacttcagttgttaatacgtttttaactcaggtcattggctaggggtgcccagagtcaaccttaggatcccagagctgtgcgcttagcttcaggtctctcgatccaaggcagggggaggacactccagtaaatccatatagtaagcaagaaattgcttgcatttcagactgacattgaggacaagaaacacttaatctcctctatgtagcttctgggagcccagtgacctagcagattgcctcagttgggagtgggatcaatacataaatatcagattcacagaacagactatatatttgcatttgaaagtatcacctatcatatttttccttttgaaaattggcacggtagtattgaagatactctgatatagaaaaacccaatattgaagcaaaatgtatatagactgacttttcatctcaagcgtcctgaactttgcacaaagaagaggtgacacgtcaagagtgatatttattatggttttgctctactcagagacacttgaggttggttattatgtaaactatgtttgtatatagcagttttgaggttttattcccacaaatggtagctgctaagattgccagcattttagccgaatttggggagaactcgccattcaaggtcccaggaaactggtgcaaatggatgatgtttaagcatgatgtcagtgcagccatcttgcctgctgtcaggaggatgtacttggcaagccacatgctatttcctttacctgggaatttttcttcaacttggtagggcagttacttttctctccaatgctgatcgcttgtgaaactcaggtccatgggtcgtttgatgctgtttacccaggaagaacaggaagaaaggtttatttttatttttattttttaatggctgcttgcattttccttttaaagaaaaacaaaacaaaacaacacaggtaactggccaaggatgggaaaatgaaatcacagttcttcaaagtgtgagtccttactgtttgatttcaaaggaaaacacaatgcacttttattacagcatttaggacctatacgaaatttatgctctatgtgctggctctggggttttgaaatgggccattagcatgcacgttaggaaataaaaggcacgagatacattcctgtcttcagtgctccaaggaagcttttcctgagatccagaatggactgtgaatgtggaaatggaaggactcagggcataccattctggcaggtgtcagccatttacctgtagtttggaggccatggtggggtagcagcttttgttcattagaaccctctgggatggtagagacagggagccaggggttcctgccacctgagctgcacttgcctgggccaggggaacatctgaccataagaactagtttgctcacgctattcgcagtacacacaagagttgcaaagtgctaacctttgcctattagaaaccctcccaaatccaagccaaactaatggctacattgaagtgttttctcaagttttgtggaaatagttagatgccaggacagttcaagccatttccccctaatcctctagaatataagtcagagtgaaatttttgagaccttccctcttcaagtctggctaacgcatttactctgcttctctggttcccacctctttatctataacacattactttctgtacagggaaggaagatgcatcaggtctgatgtgatacccccattcccccaaatataaatatatataaatatacagaatgtattcatgtttctctcggtgttttataggaattaactgataatgctctgttgataatgagaaactttctgtaacatagctgtaacatcctttcccattttcctgtgatatggaatgcactggctagggtcctgagagaatcgtgtaagtctgtggttatagatcccccatgacagtattctttaatgggataatagacctcagtgtgcagttaccactcaagaagtgtacaagagagttagaatccacacttacagccagatatatcttgtaaacttaaaatctggttaattttttaagcataggagtgggtggctgcagtccttttaggctaactgtacttggtttctgagctctgtcttctacattacatttatggctccttaaactgattgcctaaccaaccaagggcaattcccatccatccatcacatgggttgtgggaaggatgcagccatggtgtgcagcttccttcatgaaggattatctggcctggtacctgactgcttcataacttgctgtcactctgggtgagataatgtgtctttaaaaacagtccctgtggcaggtcactgggatataatgtacaacattcttagccatcatttcttttctttttttttcttttttttgttttgccctgagagactcccagtggtttctactgagggctaaagggacgagctgttccctcattgagcaagaccgttcgctgttcatgatgtgttttatgatggcttctttgggagttgcttcttcaacagtctcaactgtgctgtgggatctcctgatgctgacttttgacctttcgttttattaaaactaattagtgaaaaaaaaaaaaaaaaaaaaaaaaaaaaaaaaaaaaaaaaaaactcgagactactcgtgccgaattcggcacgagcacaggcgcctggtgaggcaggagactcagcctgaggcattcgcagataagtttctatttaaaaagatttaaaaggaaactagaactctaaacttaatagagtagcttactgagataataatattttaatattaagattttaaaagaaaagtatggaggtttatttaaacaatttgaaaaaggaaaagagaaaaatttttgtaccaccagatggaggctgacctgaggcgtttattcagagtagtttagaagattgtaaaagggagcaattgtggagtttcaaaggttctagcttgagggtcagccttgttaggtgtacttttaaacgaaggttacctaaacagaatctaaatggctttttaaaattgtaaagttgtagataatagtttgaaaatgagatgtagtttaaaaagattgaaaaaagtaagttgaagggccgttataagagtcgactgtcgcatgtacgaaggcatgagttggaaacggggaatggaagtggtagggttagtattttgagaaagaagattagaaaatggaagtggaaaaatgaagacaagttcaggaaggtgaagaaaagctgtagagaagataggaaaatagaagaccgaagaatcattagaagacagaaaaggtatttaaacacacaggtaggaagaaaactagaagatagaaaaaaagcaagatagaaagacaaaaggaaaaaaaaaagaacaaaaaaaaaaaaaaaaaacc

SEQ ID NO: 3893 - DNA, 1101 bp, Rattus norvegicus
  Genbank Accession No. NM_057208
agcagctgggtaggcaccatggccgggagcaccaccatcgaggcggtaaagcgcaagatccaggttctgcagcagcaggctgatgatgcggaggagagggctgagcgcctccagcgggaagtggagggagaaaggcgggcccgggagcaggctgaagctgaggtggcttccttgaaccgtaggatccagctggttgaagaggagctggaccgcgcccaggagcgccttgccactgctttgcagaagctggaggaagcggagaaggctgctgatgagagtgagagaggtatgaaggtgattgaaaaccgggctctaaaagatgaagaaaagatggagctccaggaaatccagctgaaggaagcaaagcacattgcagaagaggcagacaggaagtatgaagaggtggctcgtaagttggtgatcattgaaggagacttggaacgcacggaggaacgcgccgagctggcagagtctaagtgttctgagctggaggaggagctgaagaatgtcaccaacaacctcaaatctcttgaggctcaggcggagaagtactctcaaaaagaagacaagtatgaagaagaaataaagattcttactgataaactcaaggaggcggagacccgggctgagtttgctgaaagatcggtagccaagctggaaaagaccattgatgacttggaagatgagctctatgcccagaaactgaagtacaaggccattagcgacgagctggaccacgccctcaatgacatgacctctatataaactgacaccgtttctgctctgtcctggatctacccccctttcaggggtaattgatatgatataaggggcctaggaatacaattgatgttagggcgtttattagaataatgttggtgtactcggctatgaagaatagggcgaatggtcctgcggcgtattcgacgttaaagcctgagactaattctgattctccttctgttaagtcgaagggagctcgatttgtttctgctagggttgaaatgtatcatattatggctattggtcaggcggggattaatagtcagatatgttcttgtgcacttataagtatttctagggagaaggagccgcttatta

SEQ ID NO: 3894 - DNA, 2799 bp, Rattus norvegicus
  Genbank Accession No. NM_057209
ggtcgaccagctagaacgccttgagttcagacacgcagaagcacacgcctacctacctcatggctacagaaaacggagcagttgagctgggaacccagagtctgtcaacagaccacccacctacagacgcagcaggtgatggatctccagcttcagagaaagaacccagcctcccagacacagagaaagacctgggccccactaacacgaagaaagaccctggcgcgccggatccaaagaaaaatccagatccaccctccctgaagaaaactcccgaagcccctggtccagagaaaaagggtgactcggccccagcttcagccagcaaccagggcccttcaggagagggtgatggaggtgggggccctgctgaaggcggtacggggcctcctgcagtcttgccccagcccactgccacagctgatgccagcatccagaagctggacgccacgcaagcgccctcgggcaaccaggaatctggagaggccaaggcaggcaagaaggcagcagaatgccgagaagcaggacgaaggggctcacccgcctttcttcacagccctagctgccccgcgatcatctcctgttctgagaagacactggccatgaagcccttaagcgagacaacagagctcatctttgcaggggtgtctgaaacccctgatccccaagatcctggtccagctaaggacgaaggagggacgaacacgctggcagacgggaaagaagaggcagaggcaggccaggctgagcaggctaaggtgcaaggggacacctcccagaggatcgggttccaggctgttccctcagagagagcagaggtggggcaggccctctgtctcacggccaaggaggaagactgcttccaaattctggatgattgtccaccacccccagcccccttcccacacaggatcgtggagctgaggaccggaaatgtcagcagtgaattcagcatgaactcaaaggaggcattgggaggtggcaagtttggagctgtgtgcacctgcacggagagatccacaggcctcaagctggcagccaaggtcatcaagaaacagacccccaaggacaaggaaatggtgttgctggagatcgaggtcatgaaccagctgaaccaccgcaatttgatccagctgtactcagccattgagacctctcacgagatcatcctgttcatggagtacattgagggcggcgagctctttgagaggatcgtggatgaggactaccaactgacggaagtggataccatggtgttcgtcaggcagatctgcgacgggatcctcttcatgcacaagatgagggtcctgcacttggacctcaagccagagaacatcctgtgtgtgaataccaccgggcacttggtgaagataattgacttcggcctggcaagaaggtataaccccaatgagaagctgaaggtgaattttgggaccccggagttcctgtcaccagaggtggtgaactatgaccagatctctgacaagacggacatgtggagtcttggggtgatcacctacatgctactgagtggcctctctcccttcctgggcgacgatgacacggagaccctaaacaacgtcctgtctgccaactggtactttgatgaggagacttttgaagctgtgtcagacgaggccaaagacttcgtttccaatcttatcacgaaggaccagagtgccagaatgagtgctgagcagtgcctcgcccacccctggctcaacaacctggcagaaaaagccaagcgctgcaaccgtcgtctcaagtcccagatcctgcttaagaaatacctcatgaagaggcgctggaagaaaaacttcattgctgtcagcgcacgcaatcgcttcaagaagatcagtagctcgggggcactgatggctttgggggtctgaaccccaggcgactaaaagcctggatgcactcgcatggtcaaggctgaaaccagagagagccggccagatctctagagcaggctggtcaggacaaatctgcaccaggcccagaggcttggggctccgcaggtccttaggcttaccgcttcccctacgtgaacatggagtgtggcctggaatccatctgtgaccgcctcctcagcaggctgtgtgaccgcttccccctacgtgaacatggagtgtggcctggaatccactctgtgaccgcctcctcagcaggctgtgcctgtcagccccaccagactccaaggacagccaggccaggccattcctagtctctccctagcttgcccctttgaactgctgccccgtaacctttttttcctgcacctggggcactcttgccctggagcgggatggccgggggtccagcaggtgggctgctgtagtggtggtggtggatgggagattctaggagggtagaaatgcagtcagctgcaggggagacagagcaggctttgtgtgagaggacctccatgccctgcctcacactcccaacagatacaaccttgcacacaccatctggctcctggctcccaccttctgtttgtgaccaccaacacataggaacttgtgagagaaagccagcccaggcctggagaggtggtggtggtagcggagagaagtctgggaggcctgagaaccacccccctaagtttacttgaggaccgagtcttccatcctggctactctgtacccatcccaggggcatctgaaaaccccaaataacaggatgaactggccacaaggagtatgaaagccgtcggggcagacccccaaccgctctcagcttgtgccttataaataaacacacaggttggaggcagcctccttcctctgcgcatgc

SEQ ID NO: 3895 - DNA, 2721 bp, Rattus norvegicus
  Genbank Accession No. NM_057211
gcggccgtcggcggacgcgggaagaagtgtcttgtaggcgcggcgccccactcagccccggcccccctcatccgcgtactcggctgatgcctcagggcgtcagctcggcggagaggcggtcgaggcgtgcgcctggctagcagttggctttccccgtgactcggacacgtttgcagtcgaataaacttgcgaccgccacgtgtggcatctctccaaggaaccggctcaggaggagggcgcgcccatcgtgggatcgcgcggggcgcccggcagggcggcggcgacagcggcagagccggccgcggctgctgcgtgcggaggcgctgccggttacgtaaagatgaggggctgaggtcgcctcggcgctcccgcgagtcgcaagctcccgcgcccccgccccctcggccgcgccgcaccgcgctcgtcgtccgagaccagggcagggctagccgaagctccgcagccaccctcaagtttggccgcaccgcccgggctgccgtcgcccgcaccatgtccgcggccgcctacatggacttcgtggctgcccagtgtctggtttccatctccaaccgcgccgctgtgccggagcacgggggcgctccggacgccgagcgactgcgactacctgagcgcgaggtgaccaaggaacacggtgacccgggggacacctggaaggattattgcacactggtcaccatcgccaagagcttgttggacctgaacaaataccgacccatccagaccccctcggtgtgcagcgacagtctggagagtcccgatgaggatataggatccgacagcgacgtgaccaccgaatctgggtcgagtccttcccacagcccggaggagagacaggattctggcagcgcgcccagcccgctctccctcctccactctggagtggcttcgaaggggaaacacgcctccgaaaagaggcacaagtgcccctacagtggctgtgggaaagtctatggaaaatcctcccatcttaaagcccattacagagtgcatacaggtgaacggcccttcccctgcacgtggccagactgccttaaaaagttctcgcgctcggacgagctgacccgccactaccggacccacactggcgagaagcagttccgctgtccgctgtgtgagaagagattcatgaggagtgaccacctcaccaagcatgcccggcgccacaccgacttccaccccagcatgatcaagagatcaaaaaaggctcttgccagccccttgtgaggtgctccccatatggcaaccaggcagagatggtcccggaaggacagagctcccaggaaacagacggacacatggaaatctgccaccgcagagttgtgctggccacaggaggtcactgctctttggtcaatattctgacactctccctgcgctgtttccaaaaagcacacggtagcctaagatcaaagtcaacatttggtccccttgcagaggccactctgaaccgtctctgactgttggagggcaggcaaataaatgcttttggtattttctcctttgttttggggggtggggggagggggcaaggccaagacttggggtaggatttttgaagattcaggctggtgtacatacgtctgactgggtgagttgacccctggcctcccacagtgactctggatccttgatgcttgctgactctcagaattgtttttcttctctctcaatgtcacgaccagagtgcttcagcttgtttagcagagccactctcgaatcacgttaacttttgagatttaaaaaacaaaacaaaacaacaaaaaaaaaaaaaaacccctccatagcacagctgtcttttatgcaagcaagagcacacctactccagcatgatctgtcatctaaggacttcaaaacaaaacaaaacaaaaaaaaaagttacttatagtcagtggataagcagagtccgaatttacactaaacaagacagaccttcgaggggtcataagtccggaactttcaaaccttgcttcgtatgaatcgtactatctgaacataaactgcacttttattttctaataccgagggtgaatacggtaaatccatgccttgagggtagaagccgacattctgtttggcacacgttattatctgcttattttccaggatacacatttccctgagaacccacggcagagatgtgagggcagaatgtatggaaacacatgctgaggaggggaaggaggaggggagtgctttaaagatacaaaaaaaaaaaaaaaaaaaaaaagagcaaacaattttaacttcatgaatttgtttgaattttcccaagcttcagataacaacgccactcacgggactaggacgctgcaagagcattgggctctgtgtagcattagctgataaatgggtgtatagccatcaccagacctggaaatgcccccttttggtgggggtgggggtgtttcttggtctctctttcgttcctatgaaatttccactaagaggtgcaagagttatatcaaaggaaagggaactgaaatatggaaaaaaaaaagtttgcccctgtaagtagtctctagggaaggaagatgccacaatggtttcagaggcgactctgcagaacagtcccttctgctgaacataggtcagagaaacactcgtgaatggcatcacatcgccaactgtctgcatcatggcccaccactacttagcttgtatctcggtgtctacacaatggcctgaaccactggtcaccat

SEQ ID NO: 3896 - DNA, 432 bp, Rattus norvegicus
  Genbank Accession No. NM_078617
atgggtaagtgtcgtggtctccgtactgcccggaagctccgcagtcaccgacgggaccagaagtggcatgataagcagtacaagaaagcccacttgggcacagccctgaaggccaatccgtttgggggtgcctctcacgcaaagggaattgtgctggaaaaagtaggggttgaagccaaacagccaaattctgccatccggaagtgtgtcagggtgcagctcattaagaacggcaagaagatcacagcgttcgtgcccaatgacggttgcttgaacttcattgaggaaaatgatgaagttctggttgctggatttggtcgcaaaggccatgccgtgggtgatattcctggagtccgctttaaggtggttaaagtagccaatgtgtctcttttggctctgtacaaaggcaagaaggaaagaccaagatcataa

SEQ ID NO: 3897 - DNA, 1454 bp, Rattus norvegicus
  Genbank Accession No. NM_078623
gtctctccgccatggcggccctgcgtgctctgctgcccagagcctgcaactcgctgttgtccccagttcgctgcccagaattccggcgcttcgcctcgggtgctaactttcagtacatcatcacggaaaagaaaggaaagaatagcagcgtggggctgatccagttgaaccgtcccaaagcactcaatgcactttgcaatggactgattgaggagctcaaccaagcactggagacctttgaggaagatcccgctgtgggcgccattgtgctcactggtggggagaaggcctttgcagccggagctgacatcaaggaaatgcagaaccggacatttcaggactgttactcaggcaagttcctgagccactgggaccatatcacccggatcaagaaaccggtcatcgcggctgtcaatggctatgctcttggtgggggctgtgaacttgccatgatgtgcgatatcatctatgctggtgagaaagcccagtttggacagccagaaatcctcctggggaccatcccaggtgcagggggcactcagagactcacccgagcagtcggcaaatcactagcaatggagatggtcctcactggtgaccgaatttcagcacaggatgccaagcaagcaggtcttgtaagcaagatttttcccgttgaaacactggttgaagaggccatccaatgtgcagaaaagatcgccaacaattccaagatcatagtagccatggcgaaagaatctgtgaatgcagcctttgaaatgacgttaacagaaggaaataagctggagaagaagctcttctattccacctttgccactgatgaccggagagaagggatgtctgcctttgtggagaaaaggaaggccaacttcaaagaccactgagagctggcagccatacctttctccaccctggagaggaaagctcagcctgtcagagggtagtagtgtctgccacagttcctaccgaagcttcaaggctgtggccacagcttgggtactcctggtgtggcctgcaaccttcaccagttgttggaagtcggtctctcacagttttctaaatcagaaatctgggaagctttcagggtgtcttgatttgtttaacttcactctaaaggcagggcacgcttgggccagccacttccctgtgcactatctgcagtgcatagctcaagatgtgagcttcaagagggaagtggccctgcctgctgattccaagcacgagaattcaatgaaagtaactccttcggtttagtttcgactcgcctgtagttgtctctctagagggtcaatatgttttttaattattattgctatgattttcttatgggtagggttttgctgtgtatccctggctgcctggaagttactgtatagaccaggttgaccttgaattcacagagatcaaccagcctctgcttcccaagtattgggattaaaggtatatgctaccac

SEQ ID NO: 3898 - DNA, 1107 bp, Rattus norvegicus
  Genbank Accession No. NM_080399
aaggcatttcaacatcaatattattctattagtccagtagatagtagctaagtttcaaattctgtgttaatcaaaatttaaaaatatgattaagtcatattaggattacaacaaagagatgtaatctttaaagtctaccaatacatttaaatgagcagtatacagtatgtactaaataccatgccaggaaatggagaaaatgtactgtatttatagagtatattgaaaagttctgggagaaatttagatatgagctctatcttcgcacatttcagaaaataaggttaacagcaaacaggtattgctgtttatagataatctatgactgtaaagtttgtatggatttagaaattaaattagccttcagcgtctggtgaaatcccgcagcgtctagggaaagatccgttctgctccgcgagggaaacagagccgttgaccatggttgcaacgggcagtttgagcagtaagaacacggccagcatttcagagttgctggacggtggctctcaccctgggagtctgctaagtgatttcgactactgggattatgtcgtccctgagcccaacctcaacgaggtggtgtttgaagagacaacatgccagaatttggttaaaatgttggagaactgtctgtccaagtcaaagcaaaccaaactcggttgctctaaggtcctggttcctgagaaactgacccagagaattgcccaagatgtcctgcggctctcatccacagagccctgcggccttcggggctgtgttatgcacgtgaacttggaaattgaaaatgtgtgtaaaaagctggataggattgtgtgtgatgctagtgtggtgccgacctttgagctcacgctggtgttcaagcaggagagctgctcctggaccagcctcaaggacttcttctttagcggaggtcgcttctcgtcgggccttaggcgaactctgatcctcagctcgggatttcgacttgttaagaaaaaactgtactctctgattggaacgacagtcattgaggagtgctgaggaggaaaaaacaattaaaggtccctaatgagtggctaataaacctctggagctatccagcaaaaaaaaaaaaaaaaaaaaaaaaaa

SEQ ID NO: 3899 - DNA, 2669 bp, Rattus norvegicus
  Genbank Accession No. NM_080480
tgagcaccgcttccgggtcgggcttcggagtcgcggccggctcccgcttccactcgcttgggtgcgcgggagattatggcgtcttcctccgtccctcccgccaccgcacccgcggcagctggaggccccggcccgggattcggcttcgcctccaaaaccaagaagaagcatttcgtgcagcagaaagtgaaggtgttccgggccgccgacccactggtgggcgtgttcctgtggggcgtcgcccactcgatcaacgagctcagtcaggtgccacccccagtgatgctgctgccagacgactttaaagccagctccaagatcaaggtcaacaatcaccttttccatagagaaaatcttcccagtcatttcaagttcaaggagtattgtccccaggtcttcaggaacctgcgagatcggtttgccattgatgatcatgattacttggtgtcccttactcgaagccccccaagcgaaaccgaaggcagtgatggccgcttccttatctcctatgaccgcactctggtcatcaaagaagtatccagtgaggacatcgcggacatgcacagcaacctctccaattaccaccagtacatagtgaagtgtcacggcaacacccttctgccccagttcctgggcatgtaccgggtcagtgtagaaaatgaagatagctatatgctcgtgatgcgcaatatgtttagtcaccgtcttcctgtgcataggaagtatgacctcaagggctctctggtatcccgggaagccagcgataaggaaaaggttaaagaactgccaacactgaaggatatggactttcttaacaaaaaccagaaagtgtatattggtgaagaagagaagaaagtgttcctggaaaagctgaagcgagatgtggagtttctagtgcagctgaagatcatggactacagccttctactgggcatccacgacatcattcggggctctgaaccggaggaagaggggcctgtgagggaggaggagtcagagtgggatggggactgtaacctgactggacctcctgctctggtaggctcctatggcacctcccctgagggcattggaggctacattcattcccaccggcccctgggcccaggagagtttgagtccttcatcgatgtctatgctatccggagtgctgagggggccccagaaggaggtgtatttcatgggctcattgacattctaacacagtatgatgccaagaagaaagcagctcatgcagccaaaaccgtcaagcatggggcaggggcggagatctccactgtccatcctgagcagtacgctaagcgattcctggattttatttccaacatctttgcctaagtggccgcctgaccggggtgatcgctgctttatgttggaggtggcaggttctgagaggcttaggggagctggatttggccattacttctctttgctaaattcagggtacaggctccttccatccaaatacctttgttctggcggataatgttttcctgtcccagaactacactgtcctttctcccctcatccatctctctgccctccctccttgctcccagtaagcccgcctgcttcattagagtgttattgtcaactctcctaagtgccttgatctttgaaaaataccttgtttctgtgaattaggaggagctgggggcaggggcgtgtttgccatcttcagggcctgactggacggtggatatggcgcacgaactgccctggtgcactttgcagtagtatggaaggaactaaatgtgtgggttctgctgacacctttctggggcactttgtggcatgcattgcttccttcctggtaagccctggaacggagggctttcaggacactccagtgtgggtgcaggcattcacgtagggacagtctggcctggaggtcaggggaatgccagcaggctggtacctacctcacaaggcaggactaagtggacttttgcgattatgcagaggatggagaaggtccttgtcaagcattggctgttcccattctccttccccaccctactttcacctcttcccatgagtcctgggtgccagagccttgaggcagaggtgcccaagcttaggtgcagggagagcatagaggctgggaggacaggtcggagtgcagggttcattccctgtgtgacaccctttcttcccgtctacttactcccaggacttcacttctagcagaggggaataatagctctatctggtctgtctccataattttgagaggatagcgatcttgagtatgggaacctccctgtccccaggagtgtatgcctagcacttgctcctccttctctccactatccacccccagagaggagtcagagccataactcagtcacccagtcccctccaaagatgtacaatatcctcagactagagaggaactgctaggcctggtagctcctgcctgtaaatccagcactcaggaggctgagtcagaattactcaagggagttcaaggccagcctggctactgagacctggtctcagacaactcaaaactaggcttgggtttgagcactggagacgatagcttagtcggtagtgtgcttgctggcatgtacaaagctgggtccacccacgccacataagccaggtgaagcttgggaaaaagtggtaaagagatcaggattcaggtcacatcagttactggcagg

SEQ ID NO: 3900 - DNA, 5174 bp, Rattus norvegicus
  Genbank Accession No. NM_080581
gggttgagctgaactgagatcccaagaccagcggtgcaccagagccacatggaccgcttgtgcggctccggggagctgggctccaagttctgggactccaacctgactgtatataccaacactccagacctcacaccctgtttccagaactccttgctggcctgggttccctgcatctatctgtgggctgccttgccctgctacctgttctacctgaggcaccatcggcttggctacatagtcctctcatgcttatccaggctcaagacggccctcggtgttctgctgtggtgtatctcatgggtggacctgttctactccttccatggcctggttcacggctcatcccctgctcctgtcttctttatcacacccttgttggtggggatcaccatgctgctggccacattgctaatccagtatgagcggcttcggggcgtgcggtcttcaggtgtgctcatcatcttctggctcctgtgtgtgatctgtgccatcatccccttccgttccaagatcctcttggctttggcagagggtaaaatcttggatccgttccgattcaccactttctacatctacttcgccctcgtgctgtgtgccttcatcctgtcctgcttccaggagaagccgcctttgttttccccagagaatcttgacacaaatccttgcccagaggccagcgctggcttcttctcccgtctgtctttctggtggttcacaaagcttgccatccttggctaccgacgtcccctggaggacagtgacctctggtctctgtctgaggaggactgctctcacaaggtggtacaacggctactggaagcatggcaaaagcagcagacccaagcatcagggccccagactgcagcccttgagccaaagatcgcaggtgaggatgaggtcctgctgaaggcccgccccaagaccaagaagccttcctttctgagggctttggtgagaaccttcacctccagcttgctcatgggtgcctgcttcaagctgatccaggacctgctctccttcatcaacccacagctgctcagcatcctcatcaggtttatttctgaccccacggcccctacctggtggggcttcttgctggccggactgatgttcgtgagctccaccatgcagacattgatcttacaccaacattaccactgcatctttgtgatggccttgaggatacggactgctatcataggcgtcatctacaggaaggctctgaccatcaccaactcagtcaaacgtgagtacactgtgggagaaatggtcaacctcatgtcggtggacgcccagcgcttcatggatgtctccccattcatcaacctgctgtggtctgcacctttgcaggtcatcctggcgatatacttcctctggcagatcttaggcccatcagccctggctggggtggctgtgatagtcttgctgataccactcaatggagctgtgtccatgaaaatgaagacctaccaggtacagcaaatgaagttcaaagactcccgcatcaaactgatgagtgagatcctgaatggcatcaaagttctgaagctgtacgcttgggagcccaccttcttggagcaggtagaaggaatcaggcagggtgagctccagctactgcggaagggcgcctacctgcaggctatctctaccttcatctgggtctgcaccccgtttatggtgaccctgatcaccctcggggtgtacgtgtgtgtggacaagaacaatgtgctggatgctgagaaggccttcgtgtccctgtccttgttcaatatcttaaagatccccctcaacctgctgcctcagttaatcagtggcatgacccagaccagcgtgtctctgaaacggatccaggatttcctgaaccaagatgaacttgacccccagtgtgtggaaagaaagaccatctccccaggccgtgccatcaccatacacaacggcaccttctcctggtccaaggacctgcctcccacccttcacagcctaaacattcaaatcccgaagggggcattggtggctgtggtgggacctgtgggctgtgggaagtcttccctggtgtctgccttgctcggagagatggagaagctggaaggtgcagtgtctgtaaagggctctgtggcctacgtgccccagcaggcgtggatccagaactgcacacttcaggaaaatgtgctatttggccaacccatgaaccccaagcgctaccaacaggctctggagacgtgtgccctgctagctgacctagatgtgcttcctggtggggaccagacagagattggagagaagggcattaacctatctggaggccagcgacaacgggtgagtttggcccgagctgtttatagtgacgccaacatttttttgctggatgacccactgtcggctgtggactctcacgtggctaagcatatcttcgaccaagtgattggaccagaaggtgtgctggcaggcaagactcgggtgctggtaacccatggcatcagcttcctgccccagacggactttatcattgtgcttgctgacggacagattactgagatgggtcactactccgaactcctgcagcacgatggctcctttgccaacttcctccgaaactatgcaccagatgaaaaccaggaggccaatgaaggagtcttgcaacatgcaaatgaggaggtgctcctgcttgaagacacactcagcacccacacagacctgacagacaccgagccagccatatacgaggtccgcaagcagttcatgagagagatgagctccttgtcttctgaaggagagggccagaaccggcctgtgctcaagagatatacgagttcactggagaaggaggtgccggcgacacagactaaagagactggtgcattaatcaaagaggagatcgcagagacaggcaatgtgaagctgagcgtgtactgggattatgccaagtctgtggggctctgcaccacgctgtttatctgcctcctgtatgctggccaaaatgcggttgctatcggagccaatgtgtggctcagtgcctggaccaatgatgtggaggaacatggccagcagaacaacacctccgtaaggctgggagtctacgccaccctaggaatactgcaagggctcctggtcatgctgtcggccttcaccatggtggttggcgctatccaggctgcccgcctgctgcacacagctctgttgcacaaccagatccgtgcgcctcagtccttctttgacacgacgccctcaggccgcatcctcaatcgtttctccaaggacatatacgtcatcgatgaggttctggcccccaccatcctcatgctgttcaattcattctacacatccatctccaccattgtggtcatcgtggccagcacgccactcttctgcgtggttgttcttcctctggctgtgttctatggcttcgtgcagcgcttctatgtggccacatcgaggcagctgaagagactggaatccgttagccgctcgcccatcttctcccacttctcggagacagtaactggcaccagtgtcattcgggcctacggccgagtccaagacttcaaggtcctcagtgatgctaaggtggatagcaaccagaagaccacttatccttacatcgcctccaaccggtggctgggtgtccacgtggagtttgtggggaactgcgtggtgctcttctccgcgctgtttgcagtgatcgggagaaacagcttgaatccagggcttgtgggtctttccgtgtcctatgccttacaggtgaccttgagtttgaattggatgatacggacgctatccgacctggagtctaatatcatagccgtggagagagtcaaggagtactctaagacggagactgaggctccctgggtgttggagagcaaccgtgctccagaaggctggcccaggagtggggtggtagagttccggaactattcggtgcggtaccgcccgggcctcgagttggtgctgaagaatttgactctgcatgtgcagggtggggagaaggtaggcatcgtgggccgcactggggctggcaaatcttccatgactctttgcctattccgaatcctggaggccgcagagggtgagatcttcattgacgggctcaatgtggcacacattggcctccatgacctgcgttcacaactcaccatcatccctcaggaccccatcctgttctcgggcacgctgcgcatgaacctcgatccctttggccgttactcggacgaggacatctggaggaccctggagctatcccacctgagtgcatttgtgagcagccagccgacaggcctggattttcagtgctctgagggtggggataatctcagtgttggccagaggcagctcgtgtgcctagcccgagccctgctccgaaagagccgtgtcctggttttagacgaggccaccgctgccattgacctggagactgatgacctcatccagggtaccatccgtacccagtttgaagactgcactgtactgaccatcgcccaccggctcaacacaatcatggactacaaccgggtcctggtcttggacaaaggagtagtagctgaatttgattctccagtaaacctcattgcagctggaggcatcttctatgggatggccaaagatgcaggactcgcctagaatctgcattccaaaggtttcttccttgtctgaatcggacagcaagtagctgcagcatggatttgatggcaacgagtggggacatttgagttggttttggtttttttttgttttttgttttttttttttttttaaattctgcaaattgccttacagactagccatacttaacagtggaatgaggaagtgggtccttggaggtcacagccagttcacagccaagttcagaccagtccctgggtctcctagacctagtctaccattattcccgtactgcatttttttttggttctttttttcagagctggggaccgaacccagggccttgcccttcctaggtaagcgctctaccactgagctaaatccccagcccccgtactgcagtttttaagagaccctgctcctgcctctacatattcatagtttccaattttttttttaaatgagcctttctccttctggaccagggactgctaggtcagtctgtccggggaacagaatccctggttggtgctgtctgaatccactgacgaaataaagccatgagcagcagc

SEQ ID NO: 3901 - DNA, 5413 bp, Rattus norvegicus
  Genbank Accession No. NM_080583
aaattggttttgcgcagtgtcttagatctagagagaatcgagacgggcaggaaaccattacaccaccttcccggctgtgctctctgactccgccgccaccccgcccttgcctccggttcacgctgaagatccgagaatcatgactgactccaagtacttcacaaccaataagaagggagaaatctttgaattaaaagctgaactcaacaatgaaaagaaagaaaagaggaaggaggctgtgaagaaagtgattgctgctatgaccgtggggaaggatgtgagctctctcttcccagatgtggtgaactgtatgcagactgacaacctggaactaaagaagcttgtgtacctctatctgatgaactatgccaagagtcagccagacatggccatcatggctgtcaacagctttgtgaaggattgtgaagaccccaatcctttgattcgagccttggcagttagaaccatgggatgcatccgggtggacaagattacagagtatctctgtgaacccctccgcaagtgcttgaaggatgaagacccctatgttcggaaaacagcagcagtatgcgtggcaaaactccatgatatcaatgcccagatggtggaagatcagggatttctggattctctgcgggatctcatagcagattcaaacccaatggtggtggctaatgctgtagcagcattgtctgagatcagtgagtctcacccaaacagcaacttacttgatctgaaccctcagaatatcaataagctgctcacagccctgaatgagtgcactgagtggggccagattttcatcttggactgcctgtctaattacaaccctaaagatgaccgggaagctcagagcatctgtgagcgagtgacgcctcggctctctcatgccaattctgcagtggtgctttcagcagtaaaagttctgatgaagtttctagagttgttacccaaggactctgactactacaatatgctgctaaagaagctagcgcctccacttgtcactttgctctctggggagccagaagtgcagtatgttgccctgaggaacatcaacctaattgtccagaaaaggcctgaaatcttgaagcaggaaatcaaggtcttctttgtgaagtacaatgatcctatctatgttaaactagagaagttagacatcatgattcgtcttgcatcccaagccaacattgctcaggttctggcagaactgaaggaatatgccactgaagttgatgtggactttgttcgcaaagctgtgagggccattggacggtgtgccatcaaagtggagcaatcagcagaacgctgtgtgagcacactgcttgatctaatccagaccaaagtaaattatgtggtccaagaggcaattgttgtcatcagggacatcttccgaaaataccccaacaagtatgagagcattatcgccacgctgtgtgagaacttggactccctggatgaacccgatgcccgagcggctatgatttggattgtaggagagtatgctgaaagaatcgataatgccgatgagttactagagagcttcctggaaggttttcatgatgaaagcacccaggtgcagctcacgttgcttaccgccatagtgaaactgtttctcaagaagccatcagaaacacaggagctggtccaacaggtcttgagcttggccacacaggattctgataatcctgaccttcgagatcggggttatatttattggcgccttctttcaactgaccctgtgacagccaaagaagtagtgttgtctgagaagccattgatctctgaggaaacagacctcattgaacctaccctcctggatgagctcatctgccacattggttctttggcctccgtgtaccataaacctccgaatgcttttgtggaagggagccatggcattcatcgcaaacacttgccaattcaccatgggagcactgatgcaggtgatagccctgttggcaccaccactgcaaccaacctggaacagcctcaggtcatcccctctcaaggtgaccttctgggggatcttttaaatcttgacctgggtcccccagtgaatgtcccgcaagtgtcctccatgcagatgggagcagtggatcttttaggaggaggactggatagcctgcttggcagtgaccttggcgggggcattggaggaagtccggcagtaggacagtccttcatcccgtcatcagtgcctgcaaccttcgctccttcacctactcctgctgtggtcagcagtggtctgaatgacctgtttgagctttccactgggataggcatggcacctggcggatatgtggctcctaaggcagtctggctacctgctgtaaaggctaaaggcttggagatttcggggacgtttactcaccgccaagggcacatctatatggaaatgaacttcaccaacaaagctctgcagcacatgacggattttgccatccagtttaacaagaatagcttcggtgtcatcccgagcactcccttggccatacatactccgctgatgccaaaccagagcattgatgtgtctctgcctctcaacaccttgggcccagtcatgaagatggagcctctgaataacttgcaggtggctgttaaaaacaatattgatgtcttctacttcagctgcctcatcccactcaatgtgctttttgtagaagatggcaaaatggaacgccaggtcttccttgcgacgtggaaggatattcccaatgaaaatgagctccaatttcagattaaggagtgtcatttaaacgctgacacagtttccagcaagttgcaaaacaacaatgtttacactatcgccaagaggaatgtggaggggcaggacatgctgtaccagtccctgaagctcactaatggcatttggattttggcagagctgcggatccagccaggaaaccccaattatacgctgtcgctgaagtgtagagcccctgaagtctctcagtacatctatcaggtctacgacagcattttgaaaaactaataaatgggtccagtcagcctgtaatcagtgcaagccacgaactcttaactgaaagacattgtattgttgtgtagagcctgaacccaaaccctgcggtacccaccccggtagtggccagtcattttgtgctgatattagcactcaccccattggtaggttagcttcccgtgacatctccttccactatcgcccccctctgccacctgccgctgctctctgtccttagttgtgagttcctctgtgctgtgccaatggctagccttttctacaccctcttttgagtgtagtttgatattttgtaatcgaaagctcatttcacaagcagaaaaaggcaacaagttaattagagcgaggaagagtgtcactgaaacatacactgcaccttattgttttatatttttgtacagatgagatagatattgaggtagaacgctgagtagaaagggtgactgaccctcctcagacacagtcttattggagacatatggccctggccccttctggggcaaggagaggcgaccccactcctggtcttttgcattttcaccttggccacgccttccagctctcttatgcccatgctctctcatttggcgaccacattgatgtttctgagtgcagggacactggacatgtgagcacagtgctgagagatggcagagctgtgctcgtgtctacagcgctagcccaggagtcaccctgaggaggctgggtagacatgagtaagaacacagcgccctcccctagcctccttccctgtttttcagggctagttcagatttaaagtcagtgtttgagagttaagacagactttagtgacttccccaaccctgtttttctacaaagaaaggtgataggggagaagggtgctgccaaggtggcctcttggctcttgagtagcagagctgagactggtcccgacctccatcagcttccctatgtggccgccctcattattctttccttaaagcctctgccggtcctgtgcctcctgtggctctttgacactccatactgagtttggagctccaccgattccctggcgtccggtggcagctggcgtctcagttacatgagtttgcatccaggtaacaagagtgaaagcggagctgacattcgccaggactgtcctggagccacagttcggaggctggccagtgagcagtgagtatagaagtgtgtagaggtgttgccaattctcactgtccctcacctcactgatctgccctccattggtactcaagctccaaagcacaggaagatcattccagaaggctgtgtagttcttgtcatctcacagaggactggggatgggaagtgcctctcgctaaggaattggtatgaggcatcgaagaaagcctcatactgtcaccctgcttgagatgtggcacttgttgcacagcctggcacctggtattcagggtccattcagagtcctatgctcaaggcagaagcatgccagggtccaaagacctcatgtaggactcagacctgacccactggatcccgaggagaaactggaaaaatcagggtagaaaccagcttcttttaaaagtgtgtctggagtgatcctatttcctcccaaagtctttaagaggattgctggctggcaaaaaagaaataacatccctctctcactctctcactctctcactcactcactcactcactcactcactcactcaccatgtggggagtaagaaatactgcagggttgtgtgggaggcaggtggtatattgggtggaaagcaagttgaccaagttcccttgtcggtgccgattcctggagtcagttggatgtgagtggtgtaagggattcccactacagacagtgttctcatctcaaagcaaattcccaaaagtacatgtgtcagggcaagcagaaaattttataccagaacatgtccaccccagaaactaaggcctctatcagcccctctaccagtgacagataccagctgtggttctctgctggcctgagcccatccatggtgtctagctccctcttgtttttaccccaagggagttaggaggaggcaaggagctctcctgaagagactctgttgccttcctgaagcttccccttcaggtcagtttcgagcttgactagattgggagaactggggtcagtttatccgtatctgctctccttggctgaagtgtgtcgctgttgaaagctgaagtacggagggcagggaagcaaacccaccagagctctatctggtcagattccccacgtgtttgttcccagcctggtccctattgtgaagcttgggactgggaccaggtcggagagtaaaagctgtcccaggaatgcgtagtttcctgttctgtcggggtctgttgttggggaggtggggattggggagcctttaccttgtgtattcaccaataaactcatttacacaaaaaaaaaaa

SEQ ID NO: 3902 - DNA, 1505 bp, Rattus norvegicus
  Genbank Accession No. NM_080585
  misc_feature (1)..(1505): n = a or c or g or t
gtagcttggctgtgtcgggcctgaaccgagcagctgcgcgacgtcatggacacctccgggaagcaggctgaggctatggcgctgctggctgaagcggagcgcaaggtgaagaactcgcagtccttcttctccggcctctttggaggttcatccaaaatagaggaagcatgcgagatctatgccagagctgcgaacatgttcaagatggccaagaactggagcgctgctgggaacgctttctgccaggctgcccaactgcacctacagctccagagcaagcacgatgcagccacctgctttgtggacgccggcaacgctttcaagaaagctgacccccaagaggccattaactgtctgatgagagcaattgagatctatacagacatgggcagattcacaatcgcagccaagcaccacatctccattgctgagatctatgagacagaactggtggatgtagagaaggccattgcccactacgagcaatctgcagactactacaaaggagaagagtccaacagctcagccaacaagtgtctgctgaaggtggctggctacgccgcacagctggagcagtaccagaaggctatcgacatctatgagcaggtggggaccagcgccatggacagtcccctcctcaagtacagcgccaaagactacttcttcaaggcggccctttgccacttctgcatcgacatgctgaacgccaagcttgctgttcagaagtatgaggagctgttccctgccttctcggattcccgggaatgcaagctgatgaaaaagctgctggaagcccatgaggaacagaatgtggacagctacacagagtcggtgaaggaatatgactccatctccagactggaccagtggcttaccaccatgcttctacgaatcaagaagaccattcagggtgatgaggaagacctgcgctaggcctccagccactgccttccacccatctgtctgtcacagaggtggagccaacacctccaccaggagtctgaaggagtgggtncaatgtaggcctcatcctccagggcaccaggcaagctctcctggatggctggtcaccctatgcccactgcgtccttcaccccgccatttatttaagctcccaaaggtgtcctcctgctctggaaaacccacctggacagattctccaatacagacttctctgtgtgcttcaggaacctggagtcagcatccagtcccatctcctgaccagcagtgtactaaggctatttccatatctcctaccttgtaccctagcagagataagaacacaggtagttcgtgagacttgctctccctggctgggggtagcctctgcccctggagctttcccttgttcctacaatgccaacctctcaggttagacccagccctggagctcacagggtgccttggccctgccctgccctgcacctgcttctctcgctgcatccaggtctgtctgtcgacntgaagctgcggctggcccaagaaagacaannacctgccacnng

SEQ ID NO: 3903 - DNA, 2696 bp, Rattus norvegicus
  Genbank Accession No. NM_080688
gaagcagtcaagtgcaaaggagaaaaggagtcttctcattctcagtggagagcattgtggagctcgggagacgacgctcacagacacaggattactatcctacccacggtgactctggcaccagctggtggagcagtgggggatggcatctcagattcaaaagctactgaccactaatcaggacctgctgctgatgcaaaaaggaacgatgatgcgcaaggtgaggaccaaaagctggaagaagctaagatacttcagacttcaggatgacggcatgacggtctggcatgggcggcaccttgaaagcatatccaagcccactttttcaatctctgatgtggagaggatccgtaagggccaggattctgagctgttgcgctatctggtggaagagttccccctggagcaaggcttcaccattgtctttaatgggcgccgccccaacctggacctagtggccaacagtgttgaagaggcccagacttggatgcgaggactccagctgttggtggatctcgtcgccagaatgaactaccaggagcagctggatcaaatgttgagagaatggttccaacaagcagacagaaaccaggacagccggatgagtttcagagaagctcaacggctgctgcttctgatgaatgtggaaatggatgaagaatatgccttcagtctttttcaggaagcagatgtttcccaatctaatactctggattcagaagaatttgtacagttctataaggccctgactaagcgcactgagattgaagaactatttgagaacttttcatctgacaaacagaagctgaccttgctggaatttgtagatttccttagagaggaacagaaagaaagcgaccattcctctgaccttgctctgaaactcattgaccgctatgagccttctgagaatggcagattgctacgtgtgctgagcaaggatggcttcctcagctacctctgctcagcggatggaaacatcttcaaccccgactgcctccctatctatcaggatatgactcagcctctgagtcactactacatcaactcctctcacaacacctacctactgggtgaccagttttgtggccagagcagcgttgaaggatacatacgggccttgaaacgggggtgccgctgtgtggaggtggatacatgggacggacctgacggagagcccgttgtttatcatgggcgtacactgacctctcgtatcctgttcaaagatgttttggcaacattagcacaatatgccttccagtcgtcagactacccactcatcttatctctggataaccactgcacttgggaacagcagaagaccatggcacaccatctgattgcgatcctgggagagcagctgctgagtaccaccctagaggaacaactgattgatataatgccctcgccagagcagcttcgggggaagatcttggtaaaaggaaagaagttgagaacaattgaggttgttgagtctgacaaggaggaagaagagctggagaaagatgaggggtcagatctggacccagcctccgctgagcttgacatgcagtctcagcccgagtcccaggagcaggcctctgggaacaagagcaagaacaagaagaagtttcttctccagagttccacaaccatcctatgcccagacctatctgccctggttgtctacttgaggactgctcccttctgcagcttcactcactccaaagaaaactaccacatctacgacatttcatccttttctgagtccaaggccaagaacctcatcagggaggcaggcaatgagtttgtacagcacaatgccagacagctatgccgtgtataccccagtggtctgaggacagattcatcgaactataacccccaggaacactggaatgttggctgccaaatggtggccatgaacatgcagactgcaggaagtgcaatggacatctgtgatgggctcttccgccagaatgggggctctggctatgtgctgaagccagaattcctgagagatacccagagttccttcaatcccatgaagcccgttagtctttataaagcccagatccttgtagtccaggtgatcagtggtcaaagactccccaaagtggacaaaaccaaagagacaaccgttgtggatccactggtgagagtagagctctatggtgttcctgaagacacaaagcagcaagagaccagctatgtggagaacaatggtattaatccatactggggggagacattctatttccagatccaggtgcctgaacttgctatgctgcgttttgtggtaaaggattatagcaggacatcccgaaataactttataggccaatacaccctgccttggacctgcatgaaacatggctaccgacatgtatccttgctctccaaagacggcactagcctccatccagcctccatctttgtgtacacctgcatgcaagaagacctggatatggatgagccctgagaaacacagggagggtcttgaagcaggacaatctacagatgcactcttttccaacctacaacttcctcagcatccagagccagccaaaggatcagtggcggaccaaggttcccaggtgaaggttgaggaagaatcctgacccagaactatgactctagagaacagtgcacagccgagtccccactggactgctgctccttagctggtctaaatagagcttctctgtccaacttga

SEQ ID NO: 3904 - DNA, 510 bp, Rattus norvegicus
  Genbank Accession No. NM_080697
tcggcccggggctgcgggagcagggagataccgcggcggcagcgactgctgctgctggacgagcccaggggacaccgcccctgcccgcgattcgtttcagcccagcgctgctccccaggggcctgtgcggactcgcctgcgtgacgtgtcacaatgtctgaccggaaggcagtgatcaagaacgcagacatgtctgaggacatgcaacaggatgccgttgactgcgccactcaggccatggagaagtacaacatagagaaggacattgctgcctatatcaagaaggaattcgacaagaaatataaccctacctggcattgtatcgtgggccgaaattttggcagctatgtcacacacgagacaaagcacttcatctatttttacttgggtcaagttgcaatcctcctcttcaagtcaggctaggtggccgaggtgaaggtgtcagtggcggcggcagcgatggcaagcaggcggcgttgctgggactgttttgcactggggccagcatca

SEQ ID NO: 3905 - DNA, 2960 bp, Rattus norvegicus
  Genbank Accession No. NM_080698
gaggccaaacagaaggacgtggtcactctgaacggttcaacccaagggacaacatgcagtgggcctccatcctgctgctgcgcgggctctgctcgctttcccagggccagtatgaagaagactctcactggtggctccaatacctccgaaaccagcagtccacctactacgacccctacgacacttacccctacgagacctccgacccttacccctatgaagtagaggagggcccagcctatgcctatggtgccccacctccaccagagccccgtgattgtccccaagaatgcgactgtccccccaacttccccacagccatgtactgtgacaaccgcaacctcaagtacctgccctttgtgccctcccgcatgaagtacgtctacttccagaacaaccagatcgctgccatccaggaaggtgtctttgacaatgccaccggcctcctctggattgctctgcatggcaaccagattaccagtgacaagataggcaggaaggtcttctccaagctgaggcacttggagaggctgtacctggaccacaacaacctgacccggatgcccggaccactgcctcggtccctgagagagctccacctggaccacaaccagatctctcgggtccccaacaacgctctggagggcctggagaacctcacagcattatatctccatcacaatgagatccaagaagtgggaagttccatgaggggcctccggtccctgatcctactagacctgagttataaccaccttcgaagggttcccgacggtctgccctcagccctggagcagctgtacctagaacacaacaacgtctacaccgtccctgacagctacttccggggctcacccaagctgctgtatgtccggctgtctcacaacagtctcactaacaatggccttgctaccaacaccttcaattccagcagccttctggagctagacttgtcctacaaccagctgcagaagatccctcccgtcaacaccaacctggagaatctttacctccaaggcaacaggatcaatgagttctccatcagcagtttctgcacggtggtggacgtcatgaacttctccaagctgcaggtgctacgcctggatgggaacgagatcaagcgcagcgctatgccggtggacgccccactctgcctgcgccttgccagcctcatcgagatctgaggggcttcgccttgggctcggggctccgccttggactccgggctccgccttgggatcggagatcggggctcagggctccgggctccgggctccgggcactggactccgggctccaggcatcgggtaccgggcaccggggtcccggcatatgccctgccacctgctacactcagcttgaaggtctggtttggcttttgctggatggtctgggacaagcacgtgacagaagtccacaggatcttattcagtctccttccgataggcaaagttaggtgggatcaggggccaggccagtttctgcaggggatgaaagtggtggtaaaagaaatggccgcagagtctagcccccaaatcttactatccctcaacccttccccatgacctagtctggcagaccatccccttgcttggataatagcatataaccagacaatctgacttcagctgtgctcactcaatggcttggccagttgcttctgcagtcgctctgggctcctactccttgctcctcaaaacatcaaaacgtacttcctgcccagccacttcctctaggcccagctcatcccctctgccctctttcattgaggcctcttctaaggtcttagacaatcaggagacacccacaccccaaggttggtggggagctgtccaacaacctgtggaggaagaccacacattattatctgaggttaaaaggatatctaaaaccatcacacacacacacacacacacacacacacacacacacacacacaacgtcacctgtttaaagtcagcgtattgaacagtataatggtgactgatagtcatgacttaattacaaggggataaccagccctataatggaggatccatcagaggagagaagggtcaaatgctcatttttaggatccacaataagatggggaagagtcacacctcagaatggcaggactgaaggggcagccccccttccagcttcacctgaccaacatgatctgtgccccttcttgggcttttagtatcaaaggggccagtgtggtttccaaaccatgagaaagagcctctgcccatccttggatccaggtatggaggtttgttacacagaggcagaggcagactgtgccagccgtggacccacccactaacccagacaagggtgtgatctccataactggtttgtccctaaagctagagtttaaggtaccagctcttctggagatggtcactggggtacaggaagccctagccaggcccaaggcttacctacactagacatagtttcctctgcttccacactgtgggaccacaccttatactgatggtgcctgtgacgtgtagcttgtctgagagcaaccctgtcttctcctttttaaaggtgatgttgcctaggtacagccatcgggttctctagactcactgggaaagagccacgggtagccagtggcaagaaccagttgtgagatgttagcctgaggtaggtcccttcccagatgccttagacccatgactctgtgtgcacttaggagcaagcttccctgaaaaggacagggtggggtggggtgcttagactgtgccatgggttccagatcctgaaatccacaaaagccaaaccagcttgtttgaaccagggagtgccacatgtggagcaaggctgccctgcccagagctcttgagaagcacctgcatgcagataccatctggcctctataaagggtcctcagcaagaagcaagcatgagtggtggccaacctgaccaataaagttattttataagtgcaaaaaaaaaaaaaaaaa

SEQ ID NO: 3906 - DNA, 1018 bp, Rattus norvegicus
  Genbank Accession No. NM_080767
ggatctgtgcggcgctcctcgggggcagcggccgagtgggcttgccgtggatgcagaagggcttcgctcggacccgggacactacagtttctccgtgcaagctccggagctcgcgcttccccggggaatgcagcccactgaattcctgaggtcctttggtgatgaccaggaaaggaaggttcagattgaaatggcgcatggcacaaccacgctggccttcaaattccagcatggagtcatcgtggctgtagactccagggcctctgcagggagttacattgctaccataagggtgaacaaggtgatcgagattaacccttacctgcttggaactatgtctggttgtgcagccgactgtcagtactgggagaggctgttggccaaggaatgcaggctatactatctgcggaatggggaacgcatctccgtgtctgcagcctccaagctactttccaacatgatgctgcagtaccggggtatgggcctctccatgggcagcatgatctgcggctgggacaagaagggaccgggactttattacgtagatgacaatgggactcggctctcgggacagatgttctccacaggcagcgggaacacctatgcctacggggtgatggacagtgggtaccggcaggatctcagtcctgaggaggcctacgaccttgcccgaagagctattgtttatgctacccacagagacagctattctggaggagttgtcaacatgtaccacatgaagaaagacggttgggtgaaagtggagagcactgacgtcagtgacctgttgcacaagtaccgagaggccactctgtgatcactgctgggcagacatcctcccggccctgaggagctggcagactcagggacctggggctacttcagtcttaggagaaagacgggcccaacctgggctggagacaaagctctgaggctatggagacatctttgtttaccctctcactcagccagccctcacggataccttctaagtacaataaaagaaaaacagttctac

SEQ ID NO: 3907 - DNA, 3073 bp, Rattus norvegicus
  Genbank Accession No. NM_080781
cttcccgacccccacccccacggagccagatttacctggcacctttcgtccttttcatcttgttttgagttggttataaacaggaaccatgaccgcagctgagaacgtgtgctatacgttaattaacgtgccaatggactcagaacccccttctgaaatcagcttaaaaaatgacctggagaaaggcgatgtgaagtcaaagactgaagctttgaagaaagtgatcattatgattctgaatggggaaaagcttcctggactcctgatgacgatcattcgtttcgtgctgcctcttcaggatcacaccatcaaaaagttgcttctggtcttctgggaaattgttccgaaaacaactccagatgggaggctcttacatgaaatgattcttgtgtgtgatgcatacagaaaggatctccagcatcctaatgagtttattcgtggatctactcttcgtttcctttgcaaattgaaggaagcagaattgctggaacctctgatgcctgctatccgtgcttgtttggaacatcgtcacagctatgttaggagaaacgctgttttggccatctacaccatctacagaaattttgaaaatcttatacctgatgctcctgagctgatacatgattttctggtaaacgagaaggatgcaagctgcaaaagaaatgcatttatgatgctcattcatgcagatcaggatcgagctttggattatttaagtacatgtattgatcaagttcagacatttggagacattctacagttggttattgttgaactaatttataaggtctgtcatgctaatccatcagagagggcccgtttcattcgctgtatctataacttactgcagtcatctagtcctgctgtaaaatacgaagctgctgggacactggtgacactgtcaagtgctccaactgcaataaaggctgctgctcagtgttacattgatttaattattaaggaaagtgataacaatgtaaagctcattgtcctggaccgattggtagaactaaaagagcatcctgctcacgagcgagtcctccaagatctggtcatggacatcctacgagtactgagtacaccagacctagaagtgcgcaagaaaacgctgcagttagcactggatcttgtctcatctaggaatgttgaagagttggttattgtcttgaagaaggaagtaattaaaacaaataacgtgtctgagcatgaagacactgacaaataccgacagcttctcgtgcgaacactgcattcctgctctgtccgatttccagatatggctgcaaatgttattcctgtgctaatggaatttctcagtgacagtaatgaagcagcagctgctgatgtcttggagtttgtgcgtgaagccattcagcgctttgacaacctgagaatgctgattgttgagaagatgctggaagtcttccatgctattaagtctgtcaagatttatcgaggagcactgtggatcctgggcgagtactgcagtactaaggaagacattcagagtgtgatgactgaagtccgcaggtcccttggggagatcccaatcgtagaatcagaaataaagaaagaagctggcgagttaaaaccagaagaagaaataactgttgggcccgttcagaaattggttacagagatgggcacctatgctactcagagtgcactcagcagctctagacctaccaagaaagaagaggacagaccacccttgagaggattcctcctggatggagatttctttgttgctgcctcccttgccacaactctgaccaagattgcattacgctatgtagcattggttcaggagaagaaaaagcaaaactcttttgttgctgaggctatgttgcttatggcaaccatccttcatttgggaaaatcctctcttcctaagaagccaatcactgatgatgatgtagaccgaatttccctgtgcctcaaggtcttatctgaatgctcacctttaatgaatgacatttttaataaggagtgcagacagtctctttcccaaatgttgtctgccaaactcgaagaagagaaactatcccaaaagaaagaatctgaaaagaggaatgtaacagtacagcctgatgaccccatttccttcatgcaactaactgctaagaatgagatgaactgcaaggaggatcagttccagctgagtttgttggcagcgatgggtaacactcagaggaaagaggcagcagaccccctggcgtccaaactcaacaaggtcactcagttgacaggtttctctgatccagtgtatgcagaagcttatgttcatgtcaatcagtatgatattgtcctggatgttcttgttgtaaaccaaaccagtgatactttgcagaactgcacattagagttagctactctaggggatctgaaactcgtggaaaaaccatctcctttgactcttgctcctcatgactttgcgaatattaaagccaatgtcaaagtagcatcaacagaaaatggaataattttcggcaatatagtttatgatgtctctggagcagcaagtgacagaaactgtgtggtcctcagtgacatccacattgacatcatggactatatccagcctgcaacttgcactgatgctgagttccgtcagatgtgggccgaatttgaatgggaaaataaagtgacagttaacaccaacgtgactgacctgaatgattatttacagcacatcctcaagtccaccaacatgaagtgcctgactccagagaaggccctttctggctactgtggcttcatggcagccaacctatatgctcgctctatatttggagaggatgcacttgcaaatgtcagcattgagaagccagttcaccagggaccagatgctgctgttactggccatataagaattcgtgcaaaaagtcagggaatggccttgagccttggagataaaatcaacctgtctcaaaagaagactagtctctaagaatgaacaaacggtcctcgaaagtgtaaggttaaaatttaggtgtgggctgattggactccgacgtttttgtactctttcatgctttatgtttgtagaatttgagttcatgctgaattcatt

SEQ ID NO: 3908 - DNA, 3043 bp, Rattus norvegicus
  Genbank Accession No. NM_080787
ggaagacagaagcgtgggagtggagaaagtggcacaaaccagagccctggagatactctggaaacgcggagcagattgtgttggaaagctggcaacagcggtggtctcgggcgcggcgggagggcaggctgggtcgggggcgggcagtgtgtcgtcaggagctgggcggccccgcggcggccgcgtcttcctagcccatcccctcaagcccagctcgggctccggcgccccagctccgaccgtgcgctctcctgggtcaagttagagcccaccgagagccccgcgccactcgcgcactctcgcacccgggcagaaggactgcggaaggggccgccccacgggctgggtgagggctgcagcgtccagagaaggaagcgttgacagctggagccggctgctggaagggtttgcgccgggacgcgggggttgccgtagcgctacgcaagacggggcttaccctctgaaaagcaaacataagaggctgtacaaccaggttatctctgcgatcagcctcaagcagagaagaaagatggccaaagacaagggcctcatcagcccagaagactttgcccagctgcaaaagtacatagactactccaccaaaagtgtcagcgatgtgctgaaggtctttgagatgaacaaatattgccaaggagatgagattgggtacctgggatttgaacagttcctgaaaatgtatctggaagtggaggaggttccccatcacctatgctggactctgttttggtccttccatagcagtcaagacttggatgaggagactgagtcaaaagccaatgtgatctgtctcagtgacgtctactgctacttcaccctcctggaaggcggcagtccggaagacaagctagagttcaccttcaagctgtacgacatggacagaaatgggatcctagacagcacagaagtagaaaaaatcatcctgcaaatgatgagagtggctgaatatctggactgggatgtgtctgagctgagaccgatccttcaggagatgatgaaagagatggaccgggatggcagtggctgtgtctccctagctgagtgggtccgggctggggctaccactgtgcccctgcttgtccttctggggatagacatgactatgaaagatgatggacaccatatatggagacccaagagattctccagaccggtctactgcaacctgtgcgagttgagcattggcctcggcaaacaaggcctgagctgtaacctctgtaagtacattgttcatgaccactgtgccatgaaggcccagccttgtgaagtcagcacctatgccaagtctcggaaagacattggtgtccagccacacgtatgggttcgaggaggctgtcattctggacgctgcgaccgctgtcagaaaaagatccggacctaccacagcctaacgggactgcactgcgtgtggtgccacctggagatccacgatgactgtctgcaggctgttggtcccgagtgtgactgtggactgctccgtgatcatatcctgcctccgtgttctatctaccccagggtcctggtatctggacaggagtgcaaacagaagaccacagatgttacgagcctgtgcacccctgaggcttttcggattgaacctgtttctaacacccacccccttctggtcttcatcaatcctaagagcggaggcaagcaggggcagagcgtgctttggaagttccagtacattctgaaccctcggcaggtgtttaacctgaaggatggtccggagccagggctcaggtttttcaaagacgttcctcagttccgggtgttggtgtgtggtggagacggcaccgtaggctggattctagagaccattgacaaagccaactttcccattgtgcctccagtcgctgtgttgcccctgggcactggaaatgacctggctcggtgcctaagatggggaagaggttatgaaggtgagaacttgagaaagattctcaaggatatagagataagtaaggtggtatatctcgatcgatggctcctggaagtgataccccaacaaaacggagaaaagagtgatccagttccctctcaaatcatcaataactacttctccattggtgtggatgcttccattgctcaccggttccatctcatgagagagaaataccctgagaagttcaatagcagaatgaagaacaagctttggtacttggagtttgccacatcggagtccatcttctcaacgtgcaaaaagctggaagagtcagtgaccgtcgagatatgtgggaagctgctggatctgagtgacctgtccctcgaaggcattgcggtattgaatatcccgagcatgcatggtggctccaatctctggggtgacaccaagagacctcacggggatacgtgtgggatcaaccaggcactgggcagtgtggccaaaataatcacagaccccgatattctcaaaacctgtgtgccagacatgagtgacaagcggctggaagtcgtaggaatagagggtgtgattgagatgggtcagatctataccaggctcaagagtgctggacaccggctggccaagtgctccgagatcacgttccagaccacaaaaaccctccctatgcaagttgatggagaaccctggatgcaagcaccctgtacaatcaagatcacccataagaaccagatgcctatgctaatgggtccggctcccagttcctccaatttctttggcttttggagctgaggatggatgccatctgccttgagcccacctccctgttcctggagatttcccactatctagatgctgccacaccttcctgccagcccagaaggatgttccatcaccttcacagtatttattatcctccgccacctcactgctcccacacagacatccttacacaaccagcgatgcgtaaccttgaaaatgcctcatctaataaagtgactttttccatcactgggatatctgttaaaatgagcgacacatctctttttacaccttcacccctctacagacagatttaaaagcagacagaacaaataaatgaacaaagaaagcctaaaaaaa

SEQ ID NO: 3909 - DNA, 1712 bp, Rattus norvegicus
  Genbank Accession No. NM_080886
ggccgctgcacctgcccggtcttgcgccgagaccgctgtcaatcgcggggcaccaggaataaaaggccccttgcagagatttgaaaatggccatgaacaaaagtgttggcctcttcagctccgcatccctggctgtggactacgtagattccctgctgcctgagaatcctctgcaggaaccctttaagaatgcttgggtctacatgttggacaactatacaaagttccagatcgcaacctggggctccctgatcgttcatgagacgatctatttcctgttctctttacctggctttctattccagtttatacctttcatgagaaagtacaagattcaaaaggataaaccagaaacctttgaaggccagtggaagtgtttgaaaggaattctgtttaatcatttttttatccagttgcctctgatttgtggaacatactattttacagagtttttcaatattccttatgattgggaaagaatgccaagatggtatttcactttggcaaggtgtttgggctgtgcagtcatcgaggatacctggcactatttcctgcacagactccttcaccacaagaggatttataaatacattcataaagtccatcacgagttccaggctccatttggaatcgaagcagaatatgcacatcccttggaaaccctaattcttgggactggatttttcattggaattgtgcttttgtgtgatcatgtaattcttctgtgggcatgggtgaccatgcgtttgctagaaaccatcgatgtgcacagtggttatgatatccctctcaacccgttgaactacatccctttttataccggggctcggcatcacgatttccaccacatgaacttcattgggaattacgcctccaccttcacgtggtgggacagaatctttgggacggatgtccagtaccatgcctacactgaaaagatgaagaagcttgggaaaaagtctgagtgagcacctgctctccgccctcctgactgcagctggcaactaacattgcttctggggagcagaactaagcacgtgactcggctgctggtgataggaacattaacaacctttaagtactctgcgggatgagaactcttctgctcgacacccaagatctgtaaatgtgggaacaaagaaatagatacataagtacagttttcaggaggaggttttaaaggccatattgccaacctcaccgaaaggtttcaggaacccgaggaagtgttaatgtacaactcaccacttcacgccacccgaggctgaagttgacgttgccttttaagcctttttacatacactggccatttcagaaaattctcaacaataatgtctgccttcgagtttaagtcatggtgttttttagaattgacttgaaatgaaaatatcacaaagtgaatatatcagctggtgatcgagtgactgaaacccccctggtctgcggttgaccagttcaggactattctttctgtgaaggattgtttgattgtagtatctttatcagcatcttgtaaattggctcatttcctacgtgatgtacatagaatactataacttaacgactttcaagttacttggggcatttttaaattgaggagccccacttctgatgtccacccccttgtctttgtgtgtcaggtggtctcggagctttgtgaattctctatctgcacctgtcagagctggtgaaataaatgtgatttttgtccg

SEQ ID NO: 3910 - DNA, 1061 bp, Rattus norvegicus
  Genbank Accession No. NM_080887
tctctgtgacgatggtgggagtgaagccggtcgggagcgatccagatttccagccggagctgagtggggcgggctccagacttgctgtggtcaagttcaccatgagagggtgtggaccatgtttgaggatcgccccggcattcagttctatgagtaataagtacccacaggcagtcttcttggaagtagatgtgcatcagtgccagggaacagctgccaccaacaatatatcagcaacacctacatttttgttttttcgaaacaaagtgagaattgatcagtatcaaggagcagatgctgtgggactggaagaaaaaatcaagcagcatttagaaaatgaccctgggagcaatgaggacacagacattcccaagggctatatggatttaatgccttttattaacaaagctggctgcgaatgtctcaatgaaagtgatgagcacggctttgacaactgcttacgaaaagacctgtccttcttggagtctgactgcgacgagcagctgcttattactgtggcattcaatcaaccagttaaactttattccatgaagtttcaaggaccagataatggtcagggtcctaaatatgtaaaaatttttatcaacctaccccgatctatggactttgaggaggcagaaaggagtgagccaacccaagctctggaactgacagaagatgacattaaagaagatggcattgttcctcttcgttatgttaaatttcagaatgtgaacagtgtaactttgtttgttcagtctaatcaaggagaagaagaaacaacaagaatttcctattttactttcattggtactcccgtccaggcaacaaatatgaatgacttcaaacgagtagttggcaaaaagggggaaagccattagggtacttttgacactggaagactactgcagtcaaatttgcagctcctggataattgcttgattctcttcggaaactgttaatcttttatttgttgccagtaccaataaatcattgcttttgttcagatggtaatactagtgtttctattgtaatcttgatacatgcagttgtaaataaaa

SEQ ID NO: 3911 - DNA, 3219 bp, Rattus norvegicus
  Genbank Accession No. NM_080888
ccgaccatgtctcacttagtcgagccgccgccgcccctgcacaacaacaacaacaactgcgaggaaggggagcagtccctgccgccgcccgctggcctcaacagttcctgggtggagctacccatgaacagcagcaatggcaacggtaatggaaatgggaagaatgggggcctggagcacgttccttcctcgtcttccatccacaatggagacatggagaagatccttctggatgcgcagcatgagtcgggacagagcagctcaagaggcagttctcactgtgacagcccttcaccacaagaagacgggcaaataatgtttgatgttgagatgcacaccagcagggaccacagctctcagtcagaagaagaagttgtagatggagaaaaagaagttgaggctttgaagaaaagtgcagactgggtatcagactggtccagtagacccgaaaacatcccacccaaagagttccatttcagacaccctaagcgtgcagcctctctaagcatgaggaagagtggagccatgaagaaagggggcattttctctgcagagttcctgaaggtcttcatcccatctctcttcctctctcacgtgttggctttggggctgggcatctatatcggaaaacgactgagcacaccttctgccagcacctactgagggagacgaaaagcccctgggaatccgtgtggcctgtgaagtggtgtattgtagtttgaatttgagacctattgtaagcatgatccccacctacaaccctatttttacatgcccaattccaagtaactctcaaatccagtattttactcaaactctgttggggcattttactaaccttgttccctttttggcctgtaaaacactttagagattcctaacagagtttactgttgtttagaaatttgcaagggcttttttcagcaacgccaccagcagattataatcttgtcaacagtgcatcgtctcctcttagtaccactagtcacacctgcatcattcatgctagaagctgtgttctagccatgcaattacatctctttctaaatgaggtcaggtttgcaaataatactatgaaagctttgtttagtctttgttttgttttccaggacaaaaacaagcttccctgagcttgagtttataaaatgaaaacaaaccaaaaaaaggaaaaaaaaaaaaaaaaaaaaaaaaaaaaaaagaaggcaaaacacaagcaaaaaaaaaatcctgggcaataaaaattactttaaagcagctctggagcccctctttcctcatcctcctgccgccctgaatgggtaggagacagctgtgtgagggacagacaggagagaggagaggagagcatgctcgcaggtttaacatcagtatattgcaatgctgtcttttctatggtagagaatctttatttgtaaggagtgtctcaggcctagacatacatgaaacttacttttgagattttcatgcgtttggtattttcatgtgttaactgcatgtgaatttttcatgactttctttgtttttctagtttctttttttctaagaagagacttggaacgagtctgattcatggtgttaatagaggcttcttgttttaggaagctttgcttacactctggagcctttacactctgaagaataacttcagagttattccaagtacttgtgtaacttggaaaagtagacttgggttgtgggaacagttgataaagttctggaaagatgccattcactctctttgggtccttacttcctgttgttgcctacagtcttcccaaggtctccttagtctctcccaggcccctgtgactgtcttacgtaagtgtcttctcagttctgtcaaattcctgatgctctatagcactcagaaaattctttgaatggcagactttcttctgtctgtttctaaaatgtgaagctttaggaccaaattgctagtatcaggattgcagattatctcaagtagattttgttagatttcagagcacagcatcactctgagggaatctgtgtcttatatataaataattactgttaatgatgtacactttgctgaagttatagaaccattgtgaatttcaaggctagcaacctacacggtgcaccaggttgacttgaataaatttggcaaccaggtttgccagcatgcagaaactcactcttctctcacataaagggttataaaattggtgtgttatatggaaatggaaaggaaggtagataagacatttctgtcatttttcaagaacatggctgtttatctttaaggcagataatatatccaaaatagttttgtgagttattttctttctggcatttaatgtctacctgatttgagggcaacttctgcccttttcctttcttgctcttaaacctggtgatgcttgatctgccttctcacctattacttcaagtgtttataattgagtttcttaggaagaaagcaaatctggtggcctgttgttttgttgttgtttttcaaattgtcaggactgctgaggctaacctgcagcacagtttgcagcactgacgtgtgagcagagcagaatcactctttaatgctcttataggcggacatcacctctctaaattcagtagcagtttcatcggcagtgccattgaactgtgggaacatttatgattttgtctcaaccttaaaactaaatttagttttgccagtttttgaaagtatcaataaaatcatggaatatgtcccagagcaactgtccatcagtgagcatgtacgatgtcgatttgcggttccaacatacaggatgttcatgctcctacacagattcttgttgagtgaaaacagattgccctatcacaaagcaggattcaacagagttgaaatttaagataaggtttaaaaagctttattcctgtttacaatttgggatgaaaagcaggcttcgttctaagtttattgaaacctggctcagatgtttgtaggtcaagagaaaagcggcacagagacagcacagtgagtcactcaattgcagtaaagagtgaaatggagacagcccgtgagacgaatctcacagtgaagcgtttgttggacctcctggtattaatggagccagagtgacatgcatccttcgtctgtctcttcgtcagcactggcgtcattcctttcagtttaaagaacacatgtaacttgtagctataaacattttgtgccattaaagctctcacaaaacttaaaaaaaaaaaaaaaaa

SEQ ID NO: 3912 - DNA, 1685 bp, Rattus norvegicus
  Genbank Accession No. NM_080892
tctctgctgaacctttgtccattcctagcaaatcctgcaggaccagagtgtcagccagcagcatggctacaaaatgcacaaagtgtggtccaggttatgcgacccctctggaggccatgaaaggaccccgagaggagattgtctacttgccctgcatttaccgaaacacaggcattgaagccccggattatttggccacagtggatgttgaccccaagtctccccattatagccaggtcatccataggctgcccatgccacacctgaaggacgagctgcaccactcagggtggaacacctgcagtagctgctttggggacagcaccaagtcacgcgacaagctgatactgcccagcatcatctcctcccgcatctatgtggtggatgtgggctctgagcctcgtgccccgaagttgcacaaggtcattgagcccaatgaaatccatgccaagtgcaacctgggcaatctgcacaccagccactgcctggccagcggagaggtgatgatcagctccttgggggatccccaggggaatggcaaagggggttttgtgctgctggatggggagaccttcgaggtgaaagggacgtgggagaagcctgggggtgaagctccaatgggctatgacttctggtaccagcctcgacacaacatcatggtcagcactgaatgggcagctcccaatgtcttcaaagatggcttcaaccctgctcatgtggaggctgggctgtatgggagccacatacatgtgtgggactggcagcgacatgagattatccagaccctgcaaatgaaagatgggctgatccccctggagatccgcttcctgcacgacccagatgccacccagggctttgtaggctgcgccctcagctccaacatccagcgcttctacaagaatgagggaggcacctggtcagtggagaaggtgatccaggtgccctccaagaaagtgaagggctggatgttgccagaaatgcctggtttgatcaccgacatcttgctgtccctggatgaccgcttcctctacttcagcaactggctgcacggggacattcggcagtatgacatctctaacccgaagaagcctcgcctcactgggcagatcttccttgggggcagcattgttaaaggaggctctgtacaagtgctggaggaccaagagctaacgtgtcagccggagcccctagtggtcaagggaaaacgagttcctggaggtcctcagatgatccagctcagcttagatgggaagcgtctttacgtcactacatcactgtacagcgcctgggacaagcagttttaccctaatctcattagggaaggctctgtgatgctgcaaattgatgtagatacagcaaatggagggctgaagttgaaccccaactttctggtggactttgggaaagagcctcttgggccagcactggctcatgagcttcgttacccagggggtgattgcagttctgacatctggatctgaaggctagccctaaaggccttcctccacagtcggggtcctccttctgaggagcctagcttcgctctgctctgggtcccaactctccaaggccatgatgagaccatcgagaactgcagagcagtatctcactactaccttgcttgttgtttgtgccattcttaagtgagctcctggaagcaccaagaaataaaatgctgaaccttt

SEQ ID NO: 3913 - DNA, 1967 bp, Rattus norvegicus
  Genbank Accession No. NM_080896
gaattcggcaccaggttgaacttgaatcagaagatgaagtcaaattggccttgaaaaaagacagagaaactatgggacacagatatgttgaagtattcaagtcaaacaacgttgaaatggattgggtgttgaagcatactggtcccaatagtcctgacacggccaatgatggctttgtacggcttagaggactcccttttggatgtagcgaggaagaaattgttcagttcttctcagggttggaaatcgtgccaaatgggataacattgccggtggacttccaggggaggagtacgggggaggccttcgtgcagtttgcttcacaggaaatagctgaaaaggctctaaagaaacacaaggaaagaatagggcacaggtatattgaaatatttaagagcagtcgagctgaagttagaactcattatgatccaccacgaaaacttatggccatgcagcggccaggtccctatgacagacctggggctggcagagggtataacagcattggcagaggagctggctttgagaggatgaggcgtggtgcttatggtggaggctatggaggctatgatgattataatggctataatgatggctatggatttggttcggatagatttggaagagacctcaattattgtttttcaggaatgtctgaccacagatatggggatggtggctccactttccagagtacaacaggacactgtgtacacatgcggggattaccatacagagctactgagaatgacatttataattttttttcaccactcaaccctgtgagagtacatattgagactggacctgatggcagagtaactggtgaagcagatgttgagtttgcaacccatgaagatgctgttgcagctatgtcaaaagataaagcaaatatgcaacacagatatgtagaactcttcttgaattctacagcaggagcaagcggtggtgcttacgaacacagatatgtagaactcttcttgaattctacagcaggagcaagcggtggtgcttatggtagccaaatgatgggaggcatgggcttgtcaaaccagtccagttacggtggcccagccagccagcagctgagtggtggttatggaggtggctatggtggccagagcagcatgagcggatatgaccaagttttacaggaaaactccagtgattttcaatcaaacattgcataggtagccaaggagcagtgaacagcagctactacagtagcggaagccgtgcatatatgggcgtgaatggaatgggagggatgtctagcatgtctagtatgagtggtggatggggaatgtaattgattttgatcactgactcttggtcaaaaagaaatttttttaaaacccttcagtttaacagtttttgcaatccagccttgtggttttaatgcctgctctcttaagtgaactttggcatcgatcgctcaaagaaggttcaatgttgaacatagcagtcacctaggatgatagggcaaagttgagtaactttaactgttaaacttaattcctagcttttctctagttatgtaggatgtacgtaagcagtaagtgtacttaggttaaagcagttgaattatgttaaatgttgctcttatacatacatacattgaacactgttgatgcatgttgaaaagacatgctttttttgtaaaactacaggagctgcgtctacaattaaaagtgaaacatttggcatgtttgttaattctaaattcatttgataacctgtaaggcacgtgagtttaaagctcttttctttttttaagttaatggagaaattctgagacgcaataccattactttttaggatttttggtcttggtgtttgtacgaaattctgaggccttgatttaagtctttcattgtattgtgatttacttttaggtgtattgcgctaagtgaaccttgtcaaataaatcttccttttaaaagctaaaaaaaaaaaaaaaaaaaaaa

SEQ ID NO: 3914 - DNA, 355 bp, Rattus norvegicus
  Genbank Accession No. NM_080902
gaaaccggcaggactggaagggacgtctcctctccgaagactcttcaagaaatcacaatgtcaaccaacacagaccttcctctctcttcatacgatgaaggtcaggggtccaagtttattcggaaagctagggagacaccgtttgtccccattggaatggccggcttcgcagcgattgttgcatatgggctctacaagctgaagagcaggggaaacacgaagatgtctattcacttgatccacatgcgtgtggcagcccagggctttgttgtgggggccatgactcttggtatgggctattccatgtatcaagaattctgggccaagcgtaagccttagaagagctggtggcatg

SEQ ID NO: 3915 - DNA, 2773 bp, Rattus norvegicus
  Genbank Accession No. NM_080909
ggagtcagtcttccgaacaggctacgccggctacttcggagaactagctgctggattattctgtgtcccctcccactctcccgccccaagtctctcttcacccttctcccgcccttgctcgtgcagccatggcggagtcatcggcggccactcagtctccgtcagtctcctcgtcgtcctccggggccgagccgtcaacgcttggcggcggcgggagccctggagcctgccccgccctgggggcgaagagctgcggctcctcctgtgcggtgcatgatctgattttctggcgagatgtgaagaagactgggtttgtctttggcaccacgctgatcatgctgctctctctggcagctttcagtgttatcagtgtggtctcttacctcatcctggctctactctctgtcaccatcagcttcagagtctacaagtctgtcatccaagctgtgcagaagtcagaagaaggacatccattcaaggcctacctggatgtggacattacactgtcctcagaagctttccacagctacatgaatgctgcaatggtgcatgtcaacaaggccctcaaactcattattcgtctctttctggtagaagacttggttgactccttgaagctggctgtcttcatgtggctgatgacctacgtcggtgctgtttttaacggaattacccttctgattctcgccgagctgctggttttcagcgtcccaattgtctatgagaagtataagacacagattgaccactatgttgggattgcccgggatcagaccaagtcaattgttgaaaagatccaagcaaagcttcctggaatcgccaaaaaaaaggcagaataaacacatggaagcagaagtgcaacagttactaaaacgccatttaatagttataacatcgtcacttgtactatgaaggaacttgctcagtgtcagctagagtttggttccagggttgttggttctttttaatttgggttctctcccatcctctccctttaccctcagtaccaagcacaagatgtgttagactgaaaaaaagaactgatctcttagaaccctaaagaataaggattgaatcagattgatagaattaatcagaccatagtggttgtggggctttacgtgtactctaaaggaaaagaaaaacgtgtctaggtcctctctccagtttcaaggactgttacagctcccatttataattgtgcccttatttttaagtcaggaaataatgattaacttatgagtaaatagtctggggcaagagtgggatttcttcagtcccaccctcctgccttacacataagcagctactcttcctgctcctcttcgtccttaatgaaagaacttacaggcgagaggtgattccctattcccagaatgccacctgagaagtgccaggggtaaggggacagtggggggagcagtcagagggagggcagcagcagccaccctctgctgctcttcctagggaaggaagggctctgccagctgggagggcagtgcccaagccattggtctgggataccagtgtgagtgttggtttgagaaatcattccagaatgtgcttttccctcttttccctgcccaccttacctcaagtttaataaatatggttgtacttttcttattatgaagtaaatgtctgtaactgctgtacactgctataaacttgttaaagaaaaataatctgcatgtgggctcccagccattgagttattgtaatcctatctcagtctgtggaggaggaggtacaagaacatgaaaagccttccttctatttcttccctgctgcttcctcctgtgctttgcagtgctttagcctgaggaccaaagccccactgactgcaagtcatgtatctgttggcgtccagaggcctggctgactgaagaggtccatttctagaagcaggacatgcagctgcttggagtcagtgcagttctaaaaggatctccattttcagacatattgatgaaatagttcataccatgatccacagtgctcatttggatcgtgttttccagaacttttaggttgtgggtggccaagcaagaccaggtggtactgatagatacaacagaattacagtggcatcagtggaggggtccaggatcttaatttctcagaccttgcatctctccttcagcatggaaatccagtcagcttgaaaactggcatccaagagtccttcatttctcaaaccctgcctgccctattgtgaggaagtaggagctggggatttcaaggtatttgatggtcacaaagttctgtgactgtaaaagtaggaattagtcgtctttccagtccttttgggaaacgactcacagactgcgataggtagaatgccttactccatcttctcaagttcctttgcccctgtacattttgaatctttcatttccactgtagacaacactcccatcaccatgctctgccctcccaggaagtgaacgcacccatggtctatggggtctcctaacaagggacctcgttctgcactggaagcctccacagtttgctcttttctttgttgctgctgctgtgttaaaataattggaaaggtttctgtgttacatgagagggtttttttcggttttgtttttttaaacaaagactcgtagagatgaaaaaattactaatgaaattgtgtacgtgtctgtgcgtgcaacataaaaacagtagtaccaagaagctcttttggtccctgtaaaactgcaaattgatgtattaattataaataaaaaacacagtgactgtcaaaaaaaaaaaaaaaaaa

SEQ ID NO: 3916 - DNA, 2655 bp, Rattus norvegicus
  Genbank Accession No. NM_130405
gccctttccacccccgccaaccgccgctcgggcctcagcgccgtcgcgtcgcttcctcgctcgctcgccacacatcattcctgatgcagcgccgggacgaccctgccgcgcgcctcacccggtcctcgggccgcagctgctccaaggacccgtcaggtgcccacccctcggtgcgtctgaccccgtctcggccgtcgccgcttcctcaccggtcccggggaggcggaggtgggcccagaggaggcgctcgggcctcgcccgctacgcagccgccgccgctgctgcctccctctaatccgggtcccgacgcgactgtggtgggttccgcgccgaccccgctactgcccccgtcagccacagccgcggccaagatggagccggagaataagtacctgcctgaactcatggctgagaaggactcgctcgacccgtccttcactcacgccatgcagctgctgtccgtagaaattgagaagattcagaagggagagtcaaaaaaagatgacgaggagaattatttggacttattttctcataagaacatgaagctgaaagagcgggtactgatccctgtcaagcagtatccaaagttcaattttgtggggaagattcttggaccacaaggaaatacaatcaaaagactccaggaagagactggtgcaaagatctctgtcttggggaagggttcgatgagagacaaagccaaggaggaagagttgcgcaagggtggagaccccaaatatgcccatttaaatatggatctgcatgtcttcattgaagtctttggacccccatgtgaagcttatgctcttatggcccatgctatggaagaagtcaagaaatttctagtaccagacatgatggatgatatctgccaggagcagtttctagaattgtcctacttgaatggagttcctgaaccctctcgtggtcgtggggtgtctgtgagaggacgaggagctgcccctcctcctccacctgttcccagaggacgtggtgttgggccacctagaggggctttggttcgtggaaccccagtaagaggctccatcaccagaggtgccactgtgactcgaggggtgccacccccacctactgtgaggggtgctccaacaccgagagctcggacagctggtattcagagaatacctttgcctccaacacctgcaccagaaacatacgaagattatggatatgatgattcatatgcagaacagagctacgaaggctatgaaggctattacagccagagtcaaggggagtcagagtattatgactatggacatggggagcttcaagattcttatgaagcctatggacaagatgactggaatgggaccaggccatcactgaaggctcctccagctaggccagtgaagggagcatacagagagcacccatatggacgttattaaaaacaaacaggaggggaaaatatcagttatgagcaaacttgttactgatttcttgtatcccaggattcctgttgctttacccacaacagacaagtaattgtctaagtgtttttctttgtggtccctttcttttccccaccttcctccattcttaactctgcattctggcttctgtatgtagtattttaaaatgagttaaaatagatttaggaatatcgaattaattttttaagtgtgtagatgctttttttctttgttgtttaaatataaacagtgtaccttttataataaaaaaaagttgagttaaaaaaaaccacaaacatgttagtttcaaaagtggcattgcttgcttaaaggttctgaagtaaaggcttgtcaacgttttcttagctttgatttgaggcaccccgtaaagtcatagttgcagaatcccaaactaggctacatttcaaaattcagggctgcttaagctgtaaaatcacaatgttaacggcagtaggtgccaccatgtaaaagtgagctcagatgtctctaaaaacatttcctttaaaagcacatggcggttgaatcttaaggttaaattttaatatgaaagatcctcatgaattaaatagttgatgcaatttttaacgttaattgacttaaaacaacaacaaaattaggtttgtaaaatgactttttcattctgtgggttttgaaatctagccccagacatacagtgttgagagatacttagtgggggggggggttgaataggttgctggggagggaagctggccgcctaaatggagtctgacagttctttttagccacagtcttttcaataatagtactaataatcaaattttcagtatttaaaatgtcaagagtattttgtccatctgagattctgcactccatgaaaaactcacttggacactggggccgaaagctgacgctgttcattaagttgaccattgtcagtttcgcactgttgcccggtagttaagtatgttcaacactagcatgacataaaaagggacactgcagctgaatgagaagagaatcaaagtccctttgtacataagttaaagtcctaatggatttgtaccgtcctcccattttgtttttggaagattaaatgctacatgtgtaagtctgcctaaataggtagcttaacctatgtcaaaatgtctgcagcaagtttgtcaataaagtttagtccttttttaatcaaaaaaaaaaaaaaaaaaaaaaaaaa

SEQ ID NO: 3917 - DNA, 2301 bp, Rattus norvegicus
  Genbank Accession No. NM_130407
gaattcggcacgagctgtcttgccttggtctgcacttctcccatggctcctgcagacattccagcctctcttcctctcggtctgtgcctgctgctggcctctggctttgggcatgcaggcaagctgctggtggtgcccatggatggcagccactggttcaccatgcagatggttgtggagaagctccttcccaaaggccatgaggtggtggtggttgttccagaggtcagttggcagctgggaaaaccactgaattttacggtgaaaacgtattcagtttctcacactcaggaggatttaaatcgggagttcaagttttttattgattctcagtggaaaactcaacaagagggcggagttcttcctctactgactagccctgcccagggtttcttcgaattactgttttcacactgtaggagtttgtttaaggacaagaagttagtggagtacttgaagcagagttcgtttgatgctgtgtttctggatccttttgatgtgtgtggcttaactgttgccaagtacttttctctcccgtcagtggtcttcagcagggggatattttgtcactatcttgaagaaggctcccagtgccccagtcctccttcatatgtccccagaggtatcttgaaactcacagataccatgactttcaaggaaagagtgtggaaccttctttcctacatgggggagcatgcattctgtcccagttttttcaaaactgctaccgacattgcctctgaagttctccagaccccggtgactatgacagacctcttcagcccagtgtccgtttggttgttacgcacagacttcacgttggaattacccagacctgtgatgcccaatgtgatccacattggagggatcaactgccaccaaaggaagccactttccaaggaatttgaagcctatgtcaacgcctccggagaacatggcatcgtggttttctctttgggatccatggtctcagagattccagagaagaaagcgatggaaattgctgaggctttgggcagaattcctcagacggtcctgtggcgctacaccggaactagaccatcgaaccttgcaaagaacactattcttgtcaaatggctaccccaaaacgatctgcttggtcatccaaaggctcgggcgttcatcacacactccggttcccatggtatttatgaaggaatatgcaatggggttccaatggtgatgatgccttggaaaacgcccttaaaactgtcatcaataacaagagttacaaggagaacatcatgcgcctctccagccttcacaaggaccgtcctatccttgtttggtcatcagatggacaacgccaagcgcatgcaaactcggggagctggggtgaccctgaatgtcctggaaatgactgccgatgatgagcctctggacctggctgtgttctgggtggagtacgtgatgaggcacaagggggcgccacacctgcgccccgccgcccacgacctcacctggtaccagtaccactccttggacgtgattggctttctcctggccatcgtgttcacggtggtcttcattgtctataaaagttgtgcctatggctgccggaaatgctttgggggaaagggtcgagtgaagaaatcacacaaatccaagacccactgagaagtggcaggaagtgaaggagaagtattagtcccttatccaatcagttgaaacttggaaacaagtgttaaatccatgttgcttttattagggaaataattcaccatacactatacacccagaacatttttttttctttttctttttttcggagctggggaccgaacccagaacattttttttttaaataaaaacaatctaattgctggccacacccatcagggaagatactggaatatgtgatctgtttctccagtatcttcagtctggacaatgactgccatctgttggtaacttacagaaagtttagtgttctgttctgccttcagtgacagcaccacagtttcccttactcctgtcagctaatggcttcctcccctggattctcagaccagtgtggccttcccagtgttagtcattcctcactgtgctcatgttttgtgggtggcacggcctttgagctttgggagaaaacaagatgaggctgtgacactggtggccctgtgtttgagataataattattgcttgtctctgaatttgatgaaaactgaagtacattctaaagaaagtatgtcttctattgtgttcccaaaccaagaacttgtcaataaattcatataaattgtattattacttttaaaaaaaaaaaaaaaaaactcgag

SEQ ID NO: 3918 - DNA, 4256 bp, Rattus norvegicus
  Genbank Accession No. NM_130409
ctgctcccagatagatccaagacatgagactgtcagcaagaattatttggcttatattatggactgtttgtgtagcagaagattgtaaaggtcctcctccaagagaaaattcagaaattctctcaggttcgtggtctgaacaactatattcagaaggcactcaggcaacctacaaatgccgccctggataccgaacacttggtactattgtaaaagtatgcaagaatggagaatgggtaccttctaacccatcaaggatatgtcggaaaaggccatgtgggcatcccggagacacaccctttgggtcctttaggctggcagttggatctgaatttgaatttggtgcaaaggttgtttatacatgtgatgaagggtaccaactcttaggtgaaattgattaccgtgaatgtgatgcagatgggtggaccaatgatattccaatatgtgaagttgtgaagtgcttgccagtgacagaactggagaatggaagaattgtgagtggtgcagccgaaccagaccaggaatattattttggacaggtggtacgctttgaatgcaactccggcttcaagattgaaggacagaaagaaatgcactgctcagaaaatggcctctggagcaatgaaaagccacagtgtgtggaaatttcttgcctgccaccacgagttgaaaatggagatggtatatatctgaaaccagtttacaaggagaatgaaagattccaatataaatgtaagcaaggttttgtgtacaaagaaagaggggatgctgtctgcacgggttctggatggaatcctcagccttcctgtgaagaaatgacatgtttgactccatatattccaaatggtatctacacacctcacaggattaaacacagaattgatgatgaaatcagatatgaatgtaaaaatggcttatatcctgcaacccgatcacctgtttcaaagtgtacaattactggctggatccctgctccaagatgtagcttgaaaccttgtgattttccacaattcaaacatggacgtctgtattatgaagaaagccggagaccctacttcccagtacctataggaaaggagtacagctattactgtgacaacgggtttacaacgccttcacagtcatactgggactaccttcgttgcacagtaaatgggtgggagcctgaagttccatgcctcaggcaatgtattttccattatgtggaatatggagaatctttatactggcaaagaagatatatagagggtcagtctgcaaaagtccagtgtcacagtggctatagtcttccaaatggtcaagatacaatattatgtacagaaaatggctggtcccctcctcccaaatgcgtccgtatcaagacttgttcagtatcagatatagaaattgaaaatgggtttttttctgaatctgattatacatatgctctaaatagaaaaacacggtatagatgtaaacagggatatgtaacaaataccggagaaatatcaggaataattacttgtcttcaagatggatggtcacctcgaccctcatgcattaagtcttgtgatatgcctgtatttgagaatgctatgactaagaataataacacatggtttaaactcaatgacaaattagactatgaatgtcacattggatatgaaaatgaatataaacataccaaaggctctataacatgtacttatgatggatggtctagtacaccctcctgttatgaaagagaatgcagcattcccctgttacaccaagacttagttgtttttcccagagaagtaaaatacaaagttggagattcgttgagtttctcttgccgttcaggacacagagttggagcagatttagtgcaatgctaccactttggatggtcccctaatttcccaacgtgtgaaggccaagtaaaatcatgtgaccaacctcttgaaatcccgaatggggaaataaagggaacaaaaaaagttgaatacagccatggtgacgtggtggaatatgattgcaaacctagatttctactgaagggacccaataaaatccagtgtgttgacgggaagtggacaaccttgccgatatgcgttgagtatgagagaacatgtggagaccttcctgaacttgagcatggctctgtcaagttatctgtccctccctaccatcatggagattcagtggagttcacttgtacagaaaccttcacaatgattggacatgcagtagttttctgcattagtggaaggtggaccgagcttcctcaatgtgttgcaacagatcaactggagaagtgtaaagccccgaagtcaactggcatagatgcaattcatccaaataagaatgaatttaatcataactttagtgtgagttacagatgtagacaaaagcaggagtatgaacattcaatctgcatcaatggaagatgggatcctgaaccaaactgtacaagaaatgagaaaagattctgccctcctcccccacagattccaaatgcccaagtgattgaaaccacagtgaaatacttggatggagagaaagtatctgttctttgccaagatggttacctaactcagggcccagaagaaatggtgtgtaaacatggaaggtggcagtcgttaccacgctgcacggaaaaaattccatgttcccagccccctaaaattgaacatggatctattaagtcgcccaggtcctcagaagagagagatttaattgagtccagcagttatgaacacggaactacattcagctatgtctgtgatgatggattcaggatatctgaagaaaatagggtaacctgcaacatgggaaaatggagctctctgcctcgttgtgttggaataccttgtggacccccaccttcaattcctcttggtattgtttctcatgaactagaaagttaccaatatggagaggaggttacatacaattgttctgaaggctttggaattgatggaccagcatttattaaatgtgtaggaggacagtggtctgaacctcccaaatgcataaaaactgattgtgacaacttgcccacatttgaaattgccaaaccgacagaaaagaaaaaaaaatcatacaggtcaggagaacaagtgacattcagatgtccacctccgtatcgaatggatggctctgacattgtcacatgtgttaatacgaagtggattggacagccggtatgcaaagataattcctgtgtgaatccaccacatgtgccaaatgctactatactaacaaggcacaagactaaatatccatctggtgacaaagtacgttatgactgtaataaaccttttgaattattttggggaagtggaagtgatgtgcccaaaacgggattttggacagaaccaccgaaatgcaaagattcaacagggaaatgtgggcctcctccacctattgacaatggagacatcacctccttgtcattaccagtatatgcaccattatcatcagttgaatatcaatgccagaactattatctacttaagggaaataagatagtaacatgtagaaatggaaagtggtctcagccaccaacctgcttacatgcatgtgtgataccagaagatattatggaaaaacataatatagttctcagatggagggaaaatgcaaagatttattcccaatcaggggagaatattgaattcatgtgtaaacctggatatagaaaattcagaggatcacctccgtttcgtacaaagtgcattgagggtcacatcaattatcccacttgtgtataaaatcgctatacaattattagtaaaccttatggatgaacctttgtttagaaatgcacatgtatattactaatacagtttgaatttacatttgaaatattgtttagctcatttcttctaataagtatataaactttttttatatggtggttaatcaagtaactttacagactgttgccacaaagcaagaacattacattcaaaactcctaatccaaaatatgatatgtccaaggacaaactatgtctaagcaagaaaataaatgttagttcttcaatgtctgtttttattcaggacttttcagattttcttggataccttttgttgtaggttctgattcacagtgagtggaagacacactgactctgacttcaaattagtattacttgccaatacataacaaccaaactatcataatatcacaaatgtatacagctaattactgtgtcctacctttgtatcaataaagaaatctaagaaaaaaaaaaaaaaaaaaaaaaaaaaaaaaaaaaaaaaaaaaaaaaa

SEQ ID NO: 3919 - DNA, 1386 bp, Rattus norvegicus
  Genbank Accession No. NM_130411
atgagccggcaggtggttcgctccagcaaattccgccacgtgtttggacagccagccaaagctgaccagtgctatgaggatgtgcgcgtctcacaaaccacttgggacagtggcttctgcgctgtcaaccccaagttcatggctctgatctgtgaggccagtgggggaggggccttcctggtgctacccctaggcaagactggacgagtagacaagaatgtgcccctggtgtgcggccacactgcccctgtgctagacatcgcctggtgtccacacaatgacaacgtcattgccagtggctctgaggactgcacagttatggtgtgggagatcccggatgggggcctggtgctgcccttgcgggagcctgttgtcaccttggagggccacaccaagcgggttggcatcgtggcctggcaccccacagcccagaatgtactgctcagcgcaggttgtgacaatgtgatcctggtgtgggatgtgggcactggggcagccgtgctgacgctgggcccggatgtgcacccggacacaatctacagtgtggattggagccgggatggtgctctcatctgtacctcctgccgtgacaagcgtgttcgcgtcatcgagcctcgcaaaggcactgttgtggctgagaaggagcgtcctcatgagggaactcggccagtgcatgctgtgtttgtgtcagaagggaagattctaaccacggggttcagtcgcatgagtgagcggcaggtggcgctgtgggacacaaagcacctggaggagccactgtccctgcaggagctggacacaagcagtggagtcctgctacctttttttgaccctgataccaacatcgtctacctctgtggcaagggtgacagctctatccggtattttgagatcacgtctgaggctccgttcctgcattatctttccatgttcagttccaaggagtctcaacgtggtatgggctacatgcccaaacgtggcctggaagtgaataagtgcgagattgccagattctataagcttcatgagcggaaatgtgagcctattgccatgacagtgcctagaaagtcggacctgttccaggaggacctgtatccacccactgccggacccgaccccgccctcacagctgaggagtggctgagcggtcgtgatgctggccccctcctcatttccctcaaggatggctacgtgcccccaaagagcagggagctgagagtcaacaggggcctggacagtgctcgcagaagagctacaccggagcccagtagcactcttagctcggacaccgtgtcacggctggaggaggatgtgaggaatctcaacgccatagtgcaaaagcttcaagagcgcctggacaggctggaggagactgttcaggccaagtag

SEQ ID NO: 3920 - DNA, 2912 bp, Rattus norvegicus
  Genbank Accession No. NM_130416
aagctgaatcgaattcggcacgaggcagggtcccgcccgggcttgggggcggtccaggcagccagcatcctcgcgccgcccatgcgccacgccctccggccctccctggctccatattgcaggaaagcgggctagggtgtgacgctgctttctggttcagaatgtcatacccaggctaccccccgacaggctacccacctttccctggatatcctcctgcaggtcaggagtcctctttccccacttcgggtcagtatccgtaccctagtggctttccaccaatgggaggaggtgcttacccaccagctccaagtggtggctacccaggagctggaggctacccctcacctggaggttatccagcccctgggggctatcctggaaccctaaatccagggggtcctccatcctatcctggaggtcaaggctttggggccccacctggtggggcaggcttttctggctatccacagccacctgcacagtcttacggcggtggaccagcccaggttccagtcccaggtggctttcctggagggcagatgccatctcagtaccccggaggacagtctccctaccctggccagcctgctgcgatgactcagggcacccaaggaacaatccgcccagccttcaacttcgatgctatgagagatgcagagattctccgcaaggcaatgaaggggtttgggactgatgagcaagcgattgtggatgtcgtgtctaaccgttccaatgaccagaggcaacaaattaaagcagcttttaagaccatgtatggcaaggatttaattaaagatctcaagtcagagttgagtggaaacatggaagaattaatccttgccctgttcatgcctcctacatactatgatgcctggagtttgcggaaggcgatacagggagcaggaactcaagagcgtgtgttgatagagattttgtgcacaagaacaaatcaagaaatccgagacattgttagatgctatcaattagaatttggacgcgagctcgagagggacattagatcggatacctcaggacatttcgaacggctcctcgtgtccatgtgccagggaaaccgtgacgagagcccaagtataaaccaccagatggcccaggaagatgcccagcgcctctatcaggctggggaggggaggctagggacagacgaatcctgtttcaacatgatcctcgccacaaggagcttccctcagctgagagccaccatggaggcttattccaggatggctaatcgagatttgctaagcagtgtgagccgggaattttccggatacgttgaaagcggtttgaagaccatattgcagtgcgccctcaaccgccctgccttcttcgccgagcgactctactattccatgaaaggcgctggaacagatgactccaccctggtcaggattgtggtcactcggagtgagattgacctcgttcagataaaacagatgttcacccagatgtatcagaagactctaagcacgatgattgcaagtgacaccagtggagattacaggaagctgctcctggccatcgttggccagtgacggggatttttttccctttaaggaatgaagctcttcagggcctatctttctgagcaatgagacctgcatgcagccacgtcagacaccaactgaccagagtgcttttccactgaggcctgtcagggggtgtgctgcgtttgcacatgttgtcactgccttaattctaatgttagtctctttctttctgtatccaatcagtgtaaaagccatgtcaatgacatagtaatgtaaatttgtaaagcttcactcccactgctttcactttaatccggatttcaaattaaaaaaaaaggattcaaattaatgaaaaattcacagcaatctctaattctgtgtaacgttaaaagaatgagagaatgagaacggtgttcattctcattaaaacatgccgttctggtttgattgcagaaggtgatattcagttcaggaataagcctccgtgactcacatccatggctaaagtttcctggtacaaagggaataaatctgtctcagctagtaatagtgcaggacggaaaggccatgtggtgttcccctaaatacgacagtctatgcaggcaagcttctcggaggttctggaaatgtcacttggtgttcttgagacccctttccatcccaaggccagcagttgtcagccgttagtaacgcaccacactgtgtggtaggagtgccttgaacaccacacagctctgacagtggtgtcctgtacaaggctggccctcgtggtaaccagcatgtccctgagaccatcgagagcttaactggaagcaggggaaagctcctcctcttcctcctccccctcttcttcctcttcctcctccccctcctcttcctcctccctttattttttcttctttccttccttcttcttcctcatttcctcctttttttctcccccatagcccaggtctttgagtaacctgattacttctgtgttcctacccagtccagtgaatgaggaaaaggcaagcccattttacatttaattgccacaaggaaaattacctttaaaagcctcgttttttggtcttttaacaacaaatcttatgtcgtacgagtggtttgcctgcgttacatgcacatgcacccaaccacttgcatgcctattttcctgaggaggccaggagaggttttggaaaccctgaaatggagattatagatgcttgtaaactagccactcagtgctggcatcggaacccaggtcctctgtgtttggtttattagaatagaaaagtgaaaagctatagtctgagctttgattttaagataaatgtttaaacagtctggtctcatgactttacagaaacaataaaattgtataatacttctttaaaaccacaaaaaaaaaaaaaaaaaaaa

SEQ ID NO: 3921 - DNA, 2277 bp, Rattus norvegicus
  Genbank Accession No. NM_130428
cgcaagcgcagtctatcgctgaggcttgcgggaaggcaaacatggccggggttggcgcagtttcgagacttcttcgcgggcggcgcttggctctagctggggcgactcgtggctttcacttctctgttggtgagagcaagaaggcatccgctaaagtttcagacgcgatttctacccagtaccccgtggtggaccatgagtttgatgctgtggttgtaggtgcaggcggggcaggcttgcgagctgcattcggcctttctgaggcaggctttaacacggcatgccttacaaagctctttcctacccgctcacatactgttgcagcacagggaggtatcaatgctgccctggggaacatggaagaggacaactggagatggcatttctatgacaccgtgaaaggctctgactggctgggggatcaggatgccatccattacatgacagagcaagctcctgcctccgtggttgagctagaaaattacggtatgccgtttagcaggactgaagatgggaggatttatcagcgtgcatttggtggacagagcctcaagttcgggaaaggcgggcaggcccatcggtgttgctgtgtcgctgatcggacgggccactcactcttacacaccttgtatggacgatctctgcggtatgacaccagttattttgtggagtatttcgcactggatcttctgatggaaaatggggagtgccgtggtgtcattgcactgtgcatagaagatgggtccatacaccgaataagagcaaagaacactattattgctactgggggctatgggcgaacctacttcagctgtacttctgcccacaccagcacaggggacggcacagccatggtcactcgggctggtttaccttgccaggacttagaatttgttcagttccaccccacaggtatctatggtgctggctgcctcatcacagaagggtgccgtggagagggaggcattctcatcaacagccaaggcgaaaggttcatggagagatatgcccctgttgccaaggacctagcatcaagagatgttgtgtctcgatccatgactctcgagatccgtgaaggaagaggctgtggccctgagaaggatcacgtctacctgcagttgcaccatctgccccctgagcagctggccacgcgtctgcctgggatctcagagacggccatgatcttcgccggcgtggatgtcaccaaggagcccattccagtccttcccactgtgcattacaacatgggcgggattcccactaactacaagggacaggtgctgaagcacgtgaacggccaggatcagattgtgcctggtctgtacgcctgtggggaggctgcctgcgcctcagtgcatggtgccaaccggcttggagcaaactctcttttggaccttgtcgtctttggccgagcctgtgccctgagcattgcagaatcttgcaggcctggagataaagttcctccgattaaggcaaatgctggagaagagtcggttatgaatcttgacaagttgagatttgctgatggaagtgtaagaacatcagagctgcgcctcagcatgcagaagtcgatgcagagccatgccgccgtgttccgtgtgggaagtgtgctgcaagaaggctgtgaaaaagtcagccagctctatggagacctacagcatctgaagacgtttgacaggggaatggtctggaacacagacctggtggagacgctggagctgcagaatctgatgctgtgcgcactgcagaccatatatggtgcggaagcacggaaggagtcacggggagctcatgccagggaagattacaaggtgcggattgatgagtatgattactccaagcccatcgagggccagcagaagaagccatttgcggaacactggaggaagcacaccctctcatatgtggacaccaagactgggaaggttactttggattacagacctgttattgacaagaccttgaatgaggctgactgtgctactgtacctcctgctatccgttcctactgaaaaacctgacagctacaggaccagcttatgtgattatacatcatagcttacctaggtttcctctcatactcgtcttgttaaaaatctgctctcatgaacaaggagtcacttcacagattatgatcaacagcttggcagtacttgatgtgagggactcgagttgcaccattgtctctcattcttgtgcagtgataaactggtataattcttaaatgatgtacaaacgaacaatcttttatttctaaataaaaccacatagtatttg

SEQ ID NO: 3922 - DNA, 1448 bp, Rattus norvegicus
  Genbank Accession No. NM_130430
gaattcgcggcgcgtcgacctcaagaggcagaggcacatagagaaaccctatcttgaaaaacgggggagggagaaacaggggcagaatgaaaaagggaggaaggaagaaaggaaggaatgagaaagaaaagtggaaataagtcacgtataaaacgagagttaaagcctacgtcatggggttggggatttagctcagtggtagagcgcttgcctagcaagcgcaaggccctgggttcggtccccagctccggaaaaaaaaaaaaaaaagaaaaaaaaaaaagcctacgtcatcctgtctccacttagctctgccgggtcatctgaaaaccacgtggtctatttagctggagtttccggtgacctcgccccaccttcaaactcagtacttgtgcattggctgaagtattttgtcccttgggaggacccgtagctccagcctcccggtgtccgtagccgggaaacctggcgtccggcgttttaggctgaggtccgcgatgtcgagtgaggaagtccggcaccgggcagagtcctctgaggcccgtgcggccgcggtcagcgacatccaggagctgatgcgacgcaaggaggaaatcgaggcgcagatcaaggctaattacgacgtcctcgagagccaaaaaggaattggcatgaacgagcctctagtggactgcgagggctacccccgggcagatgtggatttgtatcaggtccgaacagcaaggcacaacatcatctgtctccagaatgatcacaaggcactgatgaagcaggtggaggaggccctacaccagctacatgctcgggacaaagagaagcaggctcgggacatggctgaagcccgagaagaggccatgaaccgtaggctggcctcggacagtcccgccctacccaaggcctttgccagagtgaacagtatcagccctggttccccagccagtattgcgggcctgcaagtggatgatgaaattgtggagttcggctctgtgaacacccaaaacttccagtctctgcagaacgtgggcactgtggtgcagcacagcgaggggaagcccctgaatgtcatggtgatccgcagaggggagaagcaccagctcagactgactcccacccgctgggcaggaaaaggactgctgggctgcaatattacccctctccaaagatgactgcttcctgggagctgcaggagagcttcttcagctgggcccgcgcttggcctgggggatttcctcattctctcggctccctcaagtgtaaggatctggaagagagtggcggacgcctgagcgtcgaggtggaagagacgctttggctgcctgatgtagtctctgggttgaggcattattaaaaatgtggtttgtgcttaaaaaaaaaaaaaaaaaaaaaaaaaaaaaaaaaaaaaaaaaaaaaaaaaaaaaaaaaaaaaaaaaaaaaaaaaaaaaaaaaaaaaa

SEQ ID NO: 3923 - DNA, 1619 bp, Rattus norvegicus
  Genbank Accession No. NM_130433
taaccttggccccggcggcgcgggggggggggggggcagggatggaaaagtaggggaaagggcaggggcgcggcctctcggggcgccgccacactattaaggctgggctagggctggtggccgagtgaagctgtgagagacccgtggaataactgagcttcgtcatggcgctgctacgaggtgtgtttatcgttgctgcgaagcgaacaccctttggagcttatgggggtcttctcaaggacttcactgccactgacttaactgaatttgctgccagggctgccctgtctgctggcaaagttccaccggaaaccatcgatagtgtcatcgtgggcaatgtcatgcagagctcttcagatgcggcgtacctggcaaggcatgtgggtttacgtgtgggagtcccgacggagactggggccctcaccctcaacagactctgtggctctggtttccagtccatcgtgagcggatgtcaggaaatctgctcgaaagacgctgaggtcgtcttatgtggaggaaccgagagcatgagccagtccccctactctgtcagaaatgtgcgcttcggaaccaaatttgggttagatctcaagctggaagatactttgtgggcaggattaacggatcaacacgtgaagctccccatggggatgactgcagagaacctggctgcaaaatacaacataagcagagaagactgcgacagatacgccctgcagtcccagcagaggtggaaagccgctaacgaggctggctactttaatgaggagatggcccccattgaggtgaagaccaagaagggcaaacagaccatgcaagtggatgagcacgcccggccccaaacgaccctggagcagctgcagaacctcccgccagtgttcaagaaagaggggacggtcacagcagggaacgcctcgggcatgtctgacggtgctggggtcgtcatcatagccagcgaagatgctgtcaaaaaacataacttcacaccactggccagagtcgtgggctactttgtgtctggatgtgaccctgctatcatggggatcggtccagtccctgccatcactggagcattgaagaaagctgggctgagccttaaggacatggatttgatagacgtgaatgaagcatttgctcctcagttcttggctgttcagaagagcttggatctcgaccccagtaaaaccaacgtgagtggaggtgccatagccctgggtcacccgctgggaggatctggatccagaatcaccgcacacctggttcacgagttaaggcgtcgaggtggaaaatacgcagtgggatcagcttgcattggaggtggccaaggcatctccctgatcatccagaacacagcctgaagggattgcaagcatcctacccaccctcacttggccaggctacggaacacaggcgacctttgagtcagccctgctgtgacagtaaatgcatttgaccaagccttgatgggttctgtctacttcatacctgcctagcgtgttagaataaaaagaccagccatcagaggcctttagagatacctactggtgtcattgtcagcagccaccactgtatgccttacatggtgaaattacaaactgaataaatgttgccttaactcc

SEQ ID NO: 3924 - DNA, 1089 bp, Rattus norvegicus
  Genbank Accession No. NM_130734
ggcacgaggggtcgcggtggcagccgtgcggtgcttggctccctaagctatccggtgccatccttgtcgctgcggcgactcgcaacatctgacgccatgaccgagcaaatgacccttcgtgggaccctcaagggccataatggatgggttacacagatcgccaccactccgcagttcccggacatgatcctgtcggcgtctcgagacaagaccatcatcatgtggaagctgaccagggatgagaccaactacggcataccacaacgtgctcttcgaggtcactcccactttgttagcgatgttgtcatctcctctgatggccagtttgccctctcaggctcctgggatggaaccctacgcctctgggatctcacaacgggcactaccacgagacgatttgtcggccacaccaaggatgtgctgagcgtggctttctcctctgacaaccggcagattgtctctgggtcccgagacaagaccattaagttatggaatactctgggtgtctgcaagtacactgtccaggatgagagtcattcagaatgggtgtcttgtgtccgcttctccccgaacagcagcaaccctatcatcgtctcctgcggatgggacaagctggtcaaggtgtggaatctggctaactgcaagctaaagaccaaccacattggccacactggctatctgaacacagtgactgtctctccagatggatccctctgtgcttctggaggcaaggatggccaggctatgctgtgggatctcaatgaaggcaagcacctttacacattagatggtggagacatcatcaatgccttgtgcttcagccccaaccgctactggctctgtgctgccactggccccagtatcaagatctgggacttggagggcaagatcatggtagatgaactgaagcaagaagttatcagcaccagcagcaaggcagagccaccccagtgtacctctttggcttggtctgctgatggccagactctgtttgctggctataccgacaacttggtgcgtgtatggcaggtgactattggtacccgctaaaagtttatgacagactcttagaaataaactggctttctg

SEQ ID NO: 3925 - DNA, 2028 bp, Rattus norvegicus
  Genbank Accession No. NM_130744
cccgcccgcctcgcacgcaccggcctcggctccccgcgcccgccgccgagcgaagctgctctgggatcggagcagctcatggagaaagtgccgggcgacatggagatagagcgcagggagaggaacgaggagctgtccgaggcggagaggaaggcggttcaggctacgtgggcccggctgtatgccaactgcgaggacgtgggggtggccatcctggtgaggttctttgtgaacttcccgtcggccaagcagtacttcagccagtttaaacacatggaggatccgttggagatggagaggagtcctcagctgcggaaacatgcctgccgggtcatgggggccctcaacacggtcgtggagaacctgcatgacccagacaaggtatcctctgtgctcgcgctggttggcaaggcccacgccctcaagcacaaggtggaacctatgtactttaagattctctctggggtcattctggacgtgatcgccgaggagtttgccaatgacttccccgtcgagacgcagaaagcctggaccaagctgcgcggtctcatctacagccatgtgaccgcggcctacaaggaagtgggctgggtacagcaggtccccaacaccaccaccctaccagccacactgccctcttcagggccataggacccctcccagctcccccctccctggcagcactttgggcagaaggctgacttctgaagacactccttgaccttccatttctgggtgccaaggaagctggaggaacccctgactggacttcccgaaaggaggccttcatcatggctgtggtctcccacgttactgggaggtggggctggctacctggatgctgaatttagcagaggggaacccttctgcctcgcagcagagggcacaccctccttagctttcactgtcaagagagggacctggcatgtggccggtgggaagcaaggacaagcctttgagtcacttcagaaaggaactagccctgcttcactctgccctaccagcatgcaggttctcctcaccatctctgagcattgcgcacacacacgtctaccatatacacagatatattctatatacgagctctatataaatatatatacacacacacacgtacatatctgtcgcgtgcacctgcaggcccagaagcctaggcctcgcacagctgtgggagacccggaagagtcctggccgtacttcagggcagctctaccgggagcagggagaaagcttgcaacagcacgagagggcggggccgggtgggagagtcggggtgactcagctcaccccgcacagctcagtgccctgcaatcttccccttccgcccccccaaaagagaacacttggtttgcccggtgtcggggcgcacacctgtaatccccgagtttgggacgcagaggaaggacaatctttgcaagtctgaggtcaggtggtctacacttggtctccatcttggtgagtttccggctagctggggtcgactcagggagaccccgtgtcaaacaaaacaagaagcgaagagaagatctggctcccctcccctccccaagggtttgcccgactgacttgctccggaaaggggcacaccgagaattcaggagaccccagtggggtgctggccagtgtaggtgtccggcgtttgggggtggggtgaggggcagcttcagcgtggagccctagaatgtcagcctcacccgctcacttcagacagcagccaggccacaggaccaggggccatactcaaacccctcagcagagaccagggcgcctctctcctgccctcctcggggccacctgcccatcctctccaactagtctccgtaacattcgctggggaccccgtgtgtaccccttggtcacgtgtactgtcctggaggacgtcttactgctgtggctaccgtgcctgcgtcccctctggtcccaccctcacgcagccttcctgtaactgcctgtctttttgtagtttctgatgtttgtaaccagacccagctgtgtcattaaacaggtctgctcgtgccgctcgtgccg

SEQ ID NO: 3926 - DNA, 1498 bp, Rattus norvegicus
  Genbank Accession No. NM_130755
cggccgctcctgttgcagctgcagctctctctctccgatcccttcccgccaggtcccggagttcgccctccatggctctactcactgcggcagcccggctcttgggagccaagaactcatcctgcctcgtccttgctgcccggcacgccagtgcttcttccacgaatttgaaagacatactgagcaatctgatacctaaggagcaggccagagttaagaccttcagacagcagcatgggaagacagtggttggccaaatcactgtggacatgatgtacggtggcatgagaggcatgaagggacttgtgtatgagacatcggttcttgatcctgatgagggcatccgcttccgaggctatagtatccctgagtgccagaaactgctacctaaggctaaaggtggggaagagcccctacctgagggcttattttggctgctggtaactggacagatgcccacagaggaacaggtctcttggctctcacaagaatgggcaaaaagggcagctctgccttcccatgtggtcaccatgctggacaattttccgaccaatctgcaccccatgtctcagctcagtgcagccatcacagccctcaacagtgaaagcaacttcgcccgggcatatgcagagggaataaaccgaactaagtactgggagctcatctatgaagactgtatggacctgattgccaagctgccgtgcgttgcagcaaagatctaccggaatctgtaccgggagggcagcagtattggggcaattgactctaagctggactggtcccacaattttaccaacatgttatgctacacagaacctcagttcacagaactcatgcgtttgtaccttaccatccacagtgaccatgacggtggcaatgtaagtgcccacacaagccacttggtgggcagcgccctttcagacacttacctgtcctttgcagcagctatgaatgggctggcagggcctctgcatggactagcaaaccaggaggtgcttgtctggctgacgcagctacagaaggaagtcggcaaagacgtgtcagatgagaagttacgagactacatctggaacacactcaactcgggacgggttgtcccaggatatggtcatgcagtcctaaggaagactgatccacgatattcctgtcagcgagagtttgctctgaaacatctgcccaaggatcccatgtttaagctggttgctcagctgtacaagattgtgcccaatatcctcttagagcaaggaaaggctaagaacccctggcccaacgtagatgctcacagtggggtgctgctccagtactatggcatgacggagatgaattactacacagtcctgttcggagtgtcgagggcactgggtgtgttggcccagcttatctggagcagagccctaggctttcctctagaaaggcccaagtccatgagcacggatggtctgatgaagtttgtggactctaagtcagggtaaaatgggagattatgggaaaactgact

SEQ ID NO: 3927 - DNA, 1145 bp, Rattus norvegicus
  Genbank Accession No. NM_130756
gataagtttccgcgtttctctcatctgcagcaagcagtgaaaatgtcaaagccagaggacctaggagatgctaatggcgacgccgaccgcggcgacctttccggggacctgcgtagtgtgctggtcaccagcgtgctcaacctcgagcctctagatgaagatctctacagaggaaggcattactgggtacctacctcccagcggctctttgggggtcagattgtgggccaggctctggtggctgcagccaagtccgtgagtgaagacgtccacgtgcactccctgcactgctactttgtccgggcaggggacccaaaggtgccagtgctgtaccatgtggagaggacacgaacaggagcaagcttctcagtgcgtgcagtgaaggctgtgcagcatggcaaggccatcttcatctgccaggcctccttccagcagatgcagcccagccccctgcagcaccagttctccatgcccactgtgccccccccagaggagctgctggaccatgaggcccttattgaccagtacttaagggatcctaaccttcatgagaaatatcgagtggggctgaaccgaattgctgcccgagaggtgcctattgagatcaagctggtgaacccacccgccctgaaccagctgcagacactggagcccaaacagatgttctgggtgcgagcccggggctatattggggaaggcgacatcaagatgcactgctgtgtggctgcttacatctctgactacgccttcctggggacggcactgctgcctcaccagtccaagtataaagtgaacttcatggtctcgctggaccactccatgtggttccacgccccattccgtgctgaccactggatgctctacgagtgtgagagcccctgggctggtggctctcgagggctggtacatgggcggctgtggcgtcgggatggggtccttgctgtgacctgtgcccaggagggtgtgatccgatcgaagcctcgggtatccgagagtaaactatagttggagattaactcgctcgcctggggctctaaggactctttctgctgccattcctttggcagaggtcacagttgagctgggcttcctgcctcttacatccaataaagagattgctaacactggaaaaaaaaaaaaaaaaa

SEQ ID NO: 3928 - DNA, 1082 bp, Rattus norvegicus
  Genbank Accession No. NM_130823
gaattccggagaatcttctttcgtctgctcgctctctctcccgtcgtcctagcccgccgccgcctgctgagcttgccctctccccgcttgcagacatggctgacatcaagaacaaccccgaatattcttcgtttttcggtgtcatgggcgcctcgtccgccatggtcttcagcgccatgggagctgcctatggcacagccaagagtggcactggcatcgcagccatgtcggtcatgaggccagagctgatcatgaagtccatcatcccagtggttatggctgggatcatcgccatctacggcctggtggttgcagtacttatcgctaactccctgactgatggcatcaccctctacaggagttttcttcaactgggtgctggcctgagtgtggggctgagtggcctggctgctggctttgcaattggcattgtcggagatgctggtgtccggggcactgcccagcagcctcgactgttcgtgggcatgatcctgatcctcatctttgcggaggtgcttggcctctacggtctcatcgtggccctaatcctctccacaaagtagtcttttccaccaccagtcacaggataggatgtaaagatcacccctcctcattccagaaggaacagcctgacacatgcacgggcagctgcccctcagtagttggtcttgtaaatgtgcagtgtccctagtgccattgtctgttgccccgccttgcccctactgccccgtgctgtggacatctgggcccactcatctcccacccaggcccctgaccagtgacgatttcagcctctggtcaccccacccatcgccctagagtgcgccttgtgtataagaatgaattagagttgtcatttttctcttcactggatgtttatttataaaagatttgacctattcatgtgtctgtggagcagccctgtctcccaactctatagtaatcattagtagactgttgccttgtggggttcctgttgctgagactccttggatggagccaccctgcccccagccctgaacagccgggggggggtagagagttcctcagagctggctcccagctgtgtccaataaaagttc

SEQ ID NO: 3929 - DNA, 2775 bp, Rattus norvegicus
  Genbank Accession No. NM_130826
ctcttctgctcaagatggttgcgtcccgggcaattggcagtctcagtcgcttctctgccttcaggatcctgcgctccagaggctgcatttgcacagctttacaacttcttcctgctttgctgtctagaacccatattaattatggagtcaaaggggatgtggcagttattcggattaactcgcccaattcaaaggtaaatacattgaataaagaagtacaatcagagttcgtagaagtaatgaacgaaatctgggccaacgaccaaatcaggagcgccgtccttatttcgtcaaagcctggctgctttgttgcaggtgctgacatcaacatgctggcctcttgtacaacgccccaagaagcagcacgaatatcacaagaaggacagaaaatgtttgagaaacttgaaaagtcaccaaagcctgttgttgccgccatcagtggatcctgcttgggaggcggacttgagcttgccatagcatgtcaatacagaatagcaacaaaagacagaaaaacagtattaggtgtccctgaagtgttgctgggaatcttaccaggagccggaggtacccagaggctgcccaaaatggtgggtgtgcctgctgcttttgacatgatgctgactggtaggaacattcgtgcagacagagcaaagaaaatgggactggttgaccagttggtggacccgctaggaccaggaataaaatctccagaggaaaggacaattgaatacctagaagaagttgcagttaattttgccaaaggcctggctgacaggaaggtctctgcaaagcagagcaaaggcctgatggaaaagctgacatcgtatgccatgactatcccactttgtctgactacaacattcaaaacagtggaagaaaaagtgaagaagcagaccaaaggcctttaccctgcacctttgaagataattgacgctgtgaagactggacttgagcaaggaaatgatgctggctatcttgccgaatcagagaaatttggagagcttgcattgaccaaagaatcaaaagccctgatggggctttataatggccaggtcctgtgcaagaaaaataaatttggagcgccacagaagactgttcagcagctagccatccttggcgcagggctgatgggggctggcattgcccaggtctctgtggacaagggactgaaaactcttcttaaagacactacagtgacagggctgggccggggacagcaacaagtgttcaaaggactgaatgacaaggtaaagaagaaggcactcacatccttcgaaagggactccatcttcagcaacctgatcgggcagctcgactacaagggcttcgagaaggctgacatggtgattgaggctgtcttcgaggacctcgctgttaagcacaaagtgttaaaggaagtggaaagcgtgactccagaacactgtatcttcgccagcaacacatctgctctcccaatcaatcaaattgctgctgtgagccaaaggcctgagaaggtgatcggcatgcactacttctctcctgtggacaagatgcagcttctagagatcatcacaactgacaaaacctccaaggacaccacagcgtctgccgtggccgtgggtctcaagcaggggaaggtcatcattgtggtcaaggacggacctggcttctacaccaccaggtgtcttgctcccatgatgtcagaagtcataagaatcctccaggaaggagttgaccctaagaagctggacgccttgaccacaggcttcggcttccctgtgggtgctgccaccctggcagatgaagtagggatagatgtagcacagcacgtagcagaagatctaggcaaagccttcggggagcggtttggaggtggcagcgtagaactgctgaaactgatggtctccaagggcttcttgggtcgcaagtctgggaagggcttctacatctatcagtcgggctcaaagaataagaatttgaattctgaaatagataatatcttggtaaacctgaggctgcctgccaagcccgaggtctcctctgatgaagacatccagtaccgtgtgataacaaggtttgtgaatgaggcagtcctgtgcctacaggaagggatcctagccacgcctgaagagggagacatcggagcagtctttgggcttggctttcccccttgtctcggagggcccttccgctttgtggatctgtatggtgctcagaaggtagtggaccggctccggaagtatgagtctgcctatgggacacagtttaccccgtgtcagctactccgcgaccttgctaacaactctagcaagaagttctaccagtgagcaggccgtcccgccctgcccctccacccacgtactaacccagacccggcagtgctgcttctcagccgcgctgtctaaattatcaggaagcaggagaaagaccgaggctagccttggatttgctcctccatgatagtgccttcagccctgtcccgctcttcctcctggtgaagtctgactgtgaattaaatgtttgtacttcatgttggggggtgagccccactgtgcttcttttgcaagccctgcctgagaccccgatcagcagcctagagtaacccagaacacctgctgcctgtgccttccgggaggccagtggggcctggggtgccgagggcattttcgcaccaagccaaacacaggataacattaaaatccagactgtcggcctctgccagcctggtctgttttcctctgcctgcccttgtgtttgagcacccccatcagtaataaagccctgtgctctgagcat

SEQ ID NO: 3930 - DNA, 4160 bp, Rattus norvegicus
  Genbank Accession No. NM_130894
cgcgaggccgggaaggtgaagttcagacaggtggagtcaacaccatcagtagccaatctggacctgaatcggcacagaggagacctcaagttcttttcatctttttgactccagccatgtccatgatgcccaacctgtgaaggtcccttaccagctagaaacgagatgtccctgctcttttctcgatgcaactccatcgtcaccgtcaagaaggataagcgacacatggctgaggtgaatgcttcccctctcaagcactttgtcactgccaagaaaaagatcaatggcatctttgagcagctgggggcctacatccaagagagtgccggcttccttgaagacacccacaggaatacagaactggacccagttactacagaagagcaggtcctggatgtcaaagggtactgtccaaggtcaggggaatcagcgaggtgctggccaggcggcacatgaaggtggctttttttggccggacgagcaatgggaagagcaccgtgatcaatgccatgctttgggacaaagttctgccatctgggattggccacaccaccaattgcttcctgcgggttgggggcacggatggccacgaggccttcctcctcacggagggctcagaagagaagaagagtgtcaagaccgtgaaccagctagcccatgccctccatcaggatgagcagctgcatgcaggcagcctggtgagtgtgatgtggcccaactccaagtgtccacttctgaaggatgacctcgtgctgatggacagccctgggatcgatgtcaccacggagctggacagctggattgataagttttgcctggatgctgatgtgtttgtactggtggccaactcagagtccacgctgatgcagacggagaagcagttcttccacaaagtgagtgagcgtctctcccggcccaacatcttcatcctgaacaaccgctgggatgcgtctgcctcggagcctgagtacatggaggaggtgcggcggcagcacatggaacgctgcaccagctttctggtggatgagctaggcgtggtggatcgagctcaggccggggaccggatcttctttgtgtctgccaaggaggtgctcagtgccagggtccagaaagcccagggcatgccagaaggaggtggcgctcttgcagaaggttttcaagtgaggatgtttgagtttcagaatttcgagaggcgatttgaggagtgcatttcccagtctgcagtaaagaccaaatttgagcagcacacagtccgggccaagcagattgcagaggccgtccgtctcatcatggattccctgcacattgcggctcaggagcagcgggtttattgtcttgaaatgcgggaagagcggcaagaccggctgagattcattgacaagcagctggagctcctggctcaagactataagctacggattaagcagatgacagaggaagtggaaaggcaggtgtccacagccatggctgaagagatcaggcgcctctctgtgctggttgacgagtaccagatggactttcacccatccccagttgtcctcaaggtttataagaatgaactgcaccgccatatagaggaaggcctgggacgaaacatgtctgaccgctgctccacagccattgccagttcactgcagactatgcagcaagacatgatagacggcttgaagccccttcttcctgtgtctgtgcggaatcagatagacatgctggtccctcgacagtgtttctccctcagctatgacctgaactgtgacaagctgtgcgctgactttcaggaggacatcgaattccatttctcccttggatggactatgctagtgaataggttcctgggccctaagaatagccggcgggccttgctgggctacaatgatcaggttcagcgtcctctccctctgacacctgccaaccccagcatgccacccttgccacagggctccctcacccaggaggagctcatggtctccatggttactggcctggcctctctgacttccaggacctctatgggcattctcgtggtcggaggagtggtgtggaaggcagtgggctggagactcatcgccctctcctttggactgtatggcctcctgtacgtgtatgagcggctgacctggaccaccagagccaaggagagggccttcaagcgccagtttgtggagtatgccagtgagaagctgcagctcattatcagttataccggctctaactgcagccaccaagttcagcaagaattgtctgggacatttgctcatctgtgccagcaagttgacatcacccgggataatctggagcaggaaattgctgccatgaacaagaaagttgaggctctggattcacttcagagcaaagccaaattgctcaggaataaagctggctggttggacagcgaactcaacatgttcatacaccagtacctgcagcccggcagatagtgggcagccagggcggacctgcaccgagaagagacagggccgcacctcccatcagctctagtccttggctgctgcagagagaaggaaagcacccactgtcttgtaccagttactccctaccccctgcaggaagacccccagctcatacccagtggagaccaacaaggactggacagctcagccccaaggagtcatgcatgtgtctgtgtctgctcatcatgctcagtcggttggaagtcactgtgcatttgataaggtcttcctcaggatgccatcctgcagaacgactgatgggcgccttcacaggcatcaggcaggcactcctttcagcccgagtacacctacagagagagaatgttgggggtgactggactccccagaaaagttcagggtactgaagaacttgtgtcttgcatttggccctcagctttagcactttttcccacttgcagagtctttcagttgtgcttggtggccaggctcacacaccctgggctttagactcaaccagcttatagggaaagctggagacccttgccagccagagcaaagtaagagctcaggggacggtatgtgaactagggtgtccgatgtggtagtgaggttggtgtctggcattgtgatgacaagggactcgcctcccttcttgcaagtttgctccaggtggttaaaggatgttgcaggaggaatggtggaagatgggagctgcccgggttagtacagaagaggtctctctatctgacctagcactgagtggctcacaaacctgtaaggctcaccttgctaatttgagctcatccctgccttggtacaagctccctgtggccaccgttctctggactggattgtgccgatgactgcagctggttacaaaacgacaggagaagcctggcggctgttctccttctgccccaaccctcaagcctcctcctcttctgctcctgaagcctcctgctgcttgcttcgcctcatgtcaacgctgaacttcttactgttaagtgttgaaattgttaatggtcaaaacagggaggatttcagtcaccaaggttgattgtcttggaagagcagttttagagtgatgaatcctttgtaggacaggtagagttagagataaagcactgggctccagcccctcccagaagcccacaaccaggagctctctgtgggacccatgggccatgtcctctcctgcccatgcctgtgtgtcacttcccctcagtctaccctttgtgctgggacagtgctggtcttggccaaggtcagcgtgaatggaaagacatagtgcattgccaggctggacggggtcatctcacagtgggtcattgccaggctggacggggtcatctcacagtgggtcaggacacatcagtgtcgtgtaatcccaatgagtgttatgtgctttttttttggggggggggtagaataaactcaaattctttttctgtatagcccttgagtaatgaatggaattttgagcttatataagtaaagattcatttataccaccagggagagcctgtatctgagagacgtttagcagagagcactttagtttcttgctgctaattgttgtgtgatcctttgctggggtgtagaaggcaccagacacagtgtgtttgcttctggtatatataggtgatgcatctgcctgggttacttgtatctctgccgatagtattggaacctaaaataaagccccagttgtgaccctgaaaaaaaaaa

SEQ ID NO: 3931 - DNA, 3622 bp, Rattus norvegicus
  Genbank Accession No. NM_131906
gctgctctgactttcttttagtctcagcatggagaggaccgtcttctaaagcttcttcataaaaacagcagtaagattatttaaagaatagatatctggaaacaatcagaagaacaacatgggaaaatctgagaaaagggttgcaacccatggggtcagatgttttgccaagatcaagatgtttctgttggcattaacatgtgcatatgtatccaaatcattatcaggaacttatatgaattccatgctcacacaaatagagagacaattcggtatccccacatctatagttgggcttatcaatgggagctttgaaataggaaaccttttgttgattatatttgtgagttattttggaacaaaacttcacagacctatcatgattggtgttggatgtgcagttatgggcctggggtgtttcttaatctcgctaccccatttcctcatgggccaatatgaatatgaaacgattttacctacaagcaacgtgtcctcaaacagcttcttctgtgtggaaaacagatcccagaccttaaatccaacacaagacccctcagagtgtgtgaaagaaatgaaatcattaatgtggatatatgtactggtaggaaacataatacgtggaattggtgaaactcccatcatgcccttgggtatttcctacattgaagactttgccaaatctgaaaactctcctttatacattgggattttagaaacaggaatgaccattggccctttgattggacttctgttggcttcttcctgtgcaaacatttatgtagacattgagtctgtgaatacagatgacctgaccataactcccacagatacacgctgggtcggagcttggtggatcggctttttggtctgtgcaggagtgaatatcctgaccagctttccctttttcttttttcccaaaacacttccaaaggaaggattacaggagaatgtggatggaactgaaaatgccaaagagaagaaacacagaaaaaaggccaaggaagaaaaacgaggaatcactaaagatttctttgtgttcatgaagagcctctcctgcaatccaatttacatgcttttcatccttataagtgttctccagttcaatgcatttatcaattcatttaccttcatgcctaagtatctggaacagcaatatggaaaatccactgctgaggtagtcttccttatgggtctttatatgttacctccaatatgcctcggatatttaattggtggtttgattatgaagaagttcaaggttactgtcaagaaagctgcacacttagcattctggctctgcctgtctgagtaccttctgtctttccttagctatgtgatgacctgtgataattttccagtggcaggcttaacaacctcttatgaaggggttcagcaccaactatatgtggagaacaaggtccttgctgactgtaacacaaggtgtaactgctcaacgaacacatgggatccagtgtgtggagacaatggcctggcatacatgtcagcctgccttgcaggctgtgagaagtctgttggaacaggaaccaacatggtgtttcagaattgcagctgcattcagtcatcgggaaactcatctgcagtcctgggcctgtgtaacaaaggccctgactgtgccaacaagctgcagtacttcttaatcatagcaatatttggctgtttcatatactcgctggcaggcattccagggtatatggttcttctgaggtgtatcaagtctgaagagaagtcacttggagttgggttacatgcattttgcataagaatattagctggcattcctgcacccatttactttggagctttgatagacagaacctgtttacattggggaaccctgaaatgtggtgagcccggggcatgcaggatgtatgacataaacagcttcagacgtctttaccttggattgccggctgcactaagaggagcaagctttgtccccgccttcttcattctaagacttacgaggacattccagttccctggggacattgagtcttcaaaaactgatcatgcggagatgaagctcaccttgaaggaaagtgagtgcacagaagtcctaaggtcgaaagtgacggaggactgaaaacgaagctgtaatgagttttctactgccctatgcaaggccatgaagagaatgtacacttcactagttttgaatcatgagagatacaattggaactcttaggttatccataaggccgtcaaagttacttcattcatgataaaattatttactgatagcattttcagaaggctgacatagtactcaagattttcccagggaaaacttctatagtggccttcacccttaaccttaaagctgccttcattttcaaccagcatgttctcttttaactcaatcaagggaagtggatgtttcccacacattctcaaatatctttgaaactttcctattgcagaaatatcatttagatgtttttaatttatatactgatgctggagatcaaaatatacatcttggttaagccagattgcgttagtttgttttgatttatcctctgcatgtgcaaaacttctgcatctgtcttgtgtacttaggagtggtaactctcttttacttctaagattagactcttcagagtgtgccatctcctgttttcagtcccttctatcattacttctgtcacacagttgatcatttcacatacatcactgaaaactttaatcaggttgttaaccagtcatgtagcaaagatgattgggactctttttctctaacaattcaaagctggtcatgaaactcttttttaaaaatcaagagtaggggaaaactagtcctttcaaaggctccttgtagagatgggctgtatctcagtggaatagttattacctaatgtatgtgaggccccaggttcaaccacaacgtagggtaaaccaataaagtaataaaaataacgtaagtccagatgcatcatcagatattctaaaaggctattctcatattcagggggcttcaatggcttagtgttcattctattcaagggccatggagcacatagttattaacattcataataaacttagagtaaaacctttaaagagggaccagatagaaagttcgatagaaagaactgtttgccaccgaacctgaaaaggttgttgtgatccttgggaccaacgtgaaggagagaacaaactctcacaagttgtgctatatctctttttaattgtgcatgccccattgcaaatcaattaataaaaaaagcattaaaaggtttaagaccgacatttgctgtaaaattatagctcataaacgtgaaagtacacatcaaaaataaaatcaagttgtggttgttttaatgagaaatatccctcctaggcataggcatttggatatttggtttctaatgaatgactctgcttagggaagattggatgtgcatccctaagacaaaaggtgaatcactgagatgggttgaaagttaaaagcctcacctacttccagtacactctctgctttgtgctttggttgatgatatgaaatcatggtttcctgctccagccaccatgcctggtgcttgccttcatgaacttccatccctggagtcatgcgttaaaataaactcctttttttaatgtg

SEQ ID NO: 3932 - DNA, 1376 bp, Rattus norvegicus
  Genbank Accession No. NM_133283
gggggtgccgcgccggccgcagagccctgatgctggcccggaggaagccggtgttaccggcactcaccatcaaccctaccatcgctgagggcccgtcccccaccagcgagggcgcctccgaggcacacctggtggacctccagaagaagttggaagagctggacctggatgaacagcagaggaagcggctggaggccttccttacccagaaggccaaggttggtgagctcaaggacgacgactttgagagaatctcagaactgggtgcaggcaatggcggcgtggtcacaaaggcccggcataggccctctggcctcatcatggccagaaagctgatccacctggagatcaagccagctgtccgcaaccagatcatccgggagctgcaggtgctgcatgagtgcaactcaccgtacatcgtgggcttttatggggccttctacagcgacggcgagatcagcatctgcatggagcacatggacggtggctcactggaccaggtactgaaggaggccaagcgcattcccgaggacatcttagggaaggtcagcattgcggtgctccggggcctggcgtacctccgcgagaagcaccagatcatgcatagagatgtgaagccctccaacattctggtgaactctcgtggagagattaagctgtgcgacttcggagtgagcggccagttgattgactccatggccaactcatttgtagggacacgctcctacatgtccccagaacggctgcagggcacccactactctgtgcagtcggacatctggagcatggggctgtcgctggtggagctggccatcgggaggtaccccatccccccacctgatgccaaggaactagaggccagctttggccggcctgtggtggacggggcagatggagagccccatagtgtctcaccgcggccccggccccctggacgccccatcagtggtcatgggatggacagccgaccagccatggccatctttgagctgctggactacatagtgaatgagccacctcccaagctgcccagtggtgtgttcagctcagacttccaggagtttgtgaataaatgtctcattaagaacccagcagagcgtgcagacctcaagctgctgacgaaccatgccttcatcaaacgctctgagggggaggacgtggacttcgctggctggctatgcagaaccctgcggctgaagcagcccagcacacccacgcgtactgcagtgtgacagccatcgctcagcagtctgtgtccttgtcctgtggcacagcggccgcctttggggacagcagtggtgtgtgttgtggcaggggacctgtgcctgtgcatttggaaaagcaaacaaagtggagaaagagagaaaaaaaaaaaa

SEQ ID NO: 3933 - DNA, 1935 bp, Rattus norvegicus
  Genbank Accession No. NM_133295
caaaggaacaaatagcccacagatccgcagaacccttgtccttccacaatgcgcctctaccctctggtctggctttttcttgctgcgtgcacagcttgggggtacccatcctcaccacctgtggtgaacactgttaaaggcaaagtcctggggaagtatgtcaatttggaaggatttgcacagcctgtggctgttttcctgggaatccccttcgccaagccccctcttggctccttgaggtttgctccaccacagcctgcagagccttggaactttgtgaagaatactacctcctacccacctatgtgctctcaagatgctgttggagggcaggttctctcagagcttttcaccaacaggaaggaaaacattcctttacagttttctgaagactgcctctacctgaacgtttatactccggctgacttgacaaagaacagccggctaccagtgatggtgtggatccatggaggtggactggtagtgggtggagcatccacctatgatggacaggtcctctctgcccatgaaaatgtggtggtggtgaccattcagtatcgccttggcatctggggattcttcagcacaggggatgaacacagccggggcaactggggtcacttggaccaggtggctgcactacactgggtccaggacaacattgccaactttgggggtaacccaggctctgtgaccatctttggagaatctgcaggaggtttcagtgtctctgctcttgtgttatctcctctggccaagaacctcttccacagggccatttctgagagtggtgtggtcctcacttctgctctgattacaacagatagcaagcccattgctaagctgattgctacactttctgggtgtaaaaccaccacatcagctgttatggttcattgcctgcgccagaagacagaggatgaactcctggagacttcattaaaattgaatcttttcaaactggacttacttggaaacccaaaagagagctatcccttcctacctactgtgattgacggagtggtgctgccaaagacaccagaagagatcctggctgagaagagtttcaacacagtcccctacatagtgggcatcaacaagcaagagtttggctggatcattccaacgcttatgggctatccactctccgaaggcaaactggaccagaaaacagccaaatccctcttgtggaagtcctacccaacactgaaaatctctgagaaaatgattccagtggttgctgagaagtacttcggagggacagatgaccctgccaaaaggaaagacctgttccaggacttggttgcagatgtgatatttggtgtcccatcagtaatggtgtctcgaagtcacagagatgctggagcccccaccttcatgtatgaatttgagtatcgcccaagctttgtatcagccatgaggcccaagacagtgatcggagaccatggtgatgaactcttctcagtatttggatctccatttttaaaagatggtgcctcagaagaggagaccaatctcagcaaaatggtgatgaaatactgggccaactttgctcggaatgggagccctaatgggggagggctgccccattggccagaatatgaccagaaggaagggtacctgaagattggtgcctcaactcaggcagcccagaggctgaaggacaaagaagtggctttttggtctgagctcagggccaaggaggcagcagaggaaccatcccactggaaacatgttgagctctgatcaggagggtcagccatgtttgagaacctgaagctaaaggggaattattccacagaagattttgtaaagacataacacttcttgtctttgagactataacatcacatggtattttgtacaaatgcattaaagggaaaatacttaaccttattgcttcaacttgtaaaataaaacattgtttagaaattc

SEQ ID NO: 3934 - DNA, 2320 bp, Rattus norvegicus
  Genbank Accession No. NM_133298
gtatttcataaaacagagaggatcgcaggaggccggcactctgactcctggtggatgggactagggagtcagagtcaagccctgactggctgagggcgggcgctccgagtcagcatggaaagtctctgcggggtcctggtatttctgctgctggctgcaggactgccgctccaggcggccaagcggttccgtgatgtgctgggccatgagcagtatccggatcacatgagggagaacaaccaattacgtggctggtcttcagatgaaaatgaatgggatgaacagctgtatccagtgtggaggaggggagagggcagatggaaggactcctgggaaggaggccgtgtgcaggcagccctaaccagtgattcaccggccttggtgggttccaatatcaccttcgtagtgaacctggtgttccccagatgccagaaggaagatgccaacggcaatatcgtctatgagaggaactgcagaagtgatttggagctggcttctgacccgtatgtctacaactggaccacaggggcagacgatgaggactgggaagacaacaccagccaaggccagcacctcaggttccccgacgggaagcccttccctcgcccccacggacggaagaaatggaacttcgtctacgtcttccacacacttggtcagtattttcaaaagctgggtcagtgttcagcacgagtttctataaacacagtcaacttgacagttggccctcaggtcatggaagtgattgtctttcgaagacacggccgggcatacattcccatctccaaagtgaaagacgtgtatgtgataacagatcagatccctatattcgtgaccatgtaccagaagaatgaccggaactcgtctgatgaaaccttcctcagagacctccccattttcttcgatgtcctcattcacgatcccagtcatttcctcaactactctgccatttcctacaagtggaactttggggacaacactggcctgtttgtctccaacaatcacactttgaatcacacgtatgtgctcaatggaaccttcaactttaacctcaccgtgcaaactgcagtgccgggaccatgcccctcacccacaccttcgccttcttcttcgacttctccttcgcctgcatcttcgccttcacccacattatcaacacctagtccctctttaatgcctactggctacaaatccatggagctgagtgacatttccaatgaaaactgccgaataaacagatatggttacttcagagccaccatcacaattgtagatggaatcctagaagtcaacatcatccaggtagcagatgtcccaatccccacactgcagcctgacaactcactgatggacttcattgtgacctgcaaaggggccactcccacggaagcctgtacgatcatctctgaccccacctgccagatcgcccagaacagggtgtgcagcccggtggctgtggatgagctgtgcctcctgtccgtgaggagagccttcaatgggtccggcacgtactgtgtgaatttcactctgggagacgatgcaagcctggccctcaccagcgccctgatctctatccctggcaaagacctaggctcccctctgagaacagtgaatggtgtcctgatctccattggctgcctggccatgtttgtcaccatggttaccatcttgctgtacaaaaaacacaagacgtacaagccaataggaaactgcaccaggaacgtggtcaagggcaaaggcctgagtgtttttctcagccatgcaaaagccccgttctcccgaggagaccgggagaaggatccactgctccaggacaagccatggatgctctaagtcttcactctcacttctgactgggaacccactcttctgtgcatgtatgtgagctgtgcagaagtacatgactggtagctgttgttttctacggattattgtaaaatgtatatcatggtttagggagtgtagttaattggcattttagtgaagggatgggaagacagtatttcttcgcatctgtattgtggtttttatactgttaatagggtgggcacattgtgtctgaagggggagggggaggtcactgctacttaaggtcctaggttaactgggagaggatgccccaggctccttagatttctacacaagatgtgcctgaacccagctagtcctgacctaaaggccatgcttcatcaactctatctcagctcattgaacatacctgagcgcctgatggaattataatggaaccaagcttgttgtatggtgtgtgtgtgtacataagatactcattaaaaagacagtctattaaaaaaaaaaaaaa

SEQ ID NO: 3935 - DNA, 3178 bp, Rattus norvegicus
  Genbank Accession No. NM_133308
gcacgaggggacaagagcgggtctggctggggtgtctccttcccttcgcacagcacagtggtaacttctttcgggatggagagtgtgcggacgctgtggctcagcgtggccctggcgctggcggtggggtcccgagtggtgcgcggtcaccctcagccctgccgggttcccacgcgcgctggggcctccgtgcgcctggcggcgctcctgccccgggcgcccgccgcccgcgcccgcgtcctagctgccctggccacccctgcgccgcggctgccgcacaacctgagtctggaactggtggccgtcgcgtccccgacccgggaccccgcgtcgctagctcgaggtctgtgccaggttctggcaccgcctggcgtggtggcctctatagcctttcccgaggcgcggcccgagctgcggctactgcagttcctggcagccgccacagagaccccagtggtgagcgtcctgcggagggaggtgcgcacggccctcggagccccgactccgttccatctgcagctggactgggctagtcccctggagaccatactggatgtgctggtgtccctggtacgggcacatgcctgggaggacattgctctagtactctgccgtgtccgggaccctggcagcctggtgacactctggactaaccatgctagccaggctccaaagtttgtgctggacctgagccggctggacagcaggaatgacagccttcgggctggactggccctgttgggggcgctggaaggagggggaaccccagtgcctgcagcagtcctcctaggctgcagcactgcccgtgcacatgaggtcctagaggctgcaccaccgggtccccagtggttgctgggcacaccattgcccgctgaggcactgcccacgactggtctgccacctggcgtgctggcgctgggggaaaccgaacaacactctctggaagctgtcgtccacgacatggtggagcttgtggctcaggcactcagtagcatggcccttgtacacccagagcgggcactgcttccagctgtggtgaactgtgatgacctgaaaacaggcggatctgaggcaacagggcgcaccttggctcggtttctcggcaacacctcatttcagggccgaacaggggccgtgtgggtgacaggctcctctcaggtgcatgtgtctcggcatttcaaggtatggagcctgcgccgggatccgctgggtgccccagcctgggcaaccgtgggcagctggcaggatggacagctggacttccagccaggggcagccgctctccgagtcccatctccgtctggcacccaggcccgaccaaagctgcgtgtggtaaccctggtggaacacccgtttgtgttcaccagggaatctgatgaagacggacagtgcccagctgggcagctgtgtctggacccaggcaccaatgactcagccaggctggatgccctctttgctgcactggtgaatggctcagtacctcgaacgctgagaagatgctgctatggctactgcatcgacctgctggagcggctggccgaggacctggcctttgactttgagctctatattgtgggggatggcaagtacggggccctgcgtgatgggcgctggacgggcctggtgggtgacctgctggctggccgggcacacatggctgtgaccagcttcagcatcaactcagctcgctctcaggtggtggatttcaccagccctttcttctccaccagcctggggattatggtgcgcacgagagacacggcctcgcccatcggggctttcatgtggcccctgcactggtccatgtgggtgggcgtgtttgctgctctgcacctcacagcgctctttctcaccctgtacgaatggcgaagtccctacgggctcacgccgcgcggccgcaaccgtggcactgtcttctcttactcctccgcgctcaacctgtgctatgccattctctttggacgcactgtctccagtaagacgcccaagtgccctactggacgcttcctcatgaacctctgggcaatcttctgcctgctggtgctttccagttacacggccaacctggctgctgtcatggttggggacaaaacctttgaggagctgtctggaatccatgatcccaagctgcaccacccttcccaaggctttcgctttggcaccgtatgggagagcagcgcggaggcctacatcaaggcaagcttccctgagatgcacgcacacatgcgtcggcacagcgcacccaccactccacatggggtggccatgctcacgagcgacccgcccaagctcaacgccttcatcatggataaatcactactggactatgaggtgtccatagatgcggactgcaagctgctcaccgttggcaaaccctttgctatcgagggctacggcatagggctaccccaaaactcgccgctcacctccaacctgtcggagttcatcagtaggtacaagtcttcaggcttcattgatctgctccatgacaagtggtacaagatggtgccttgcgggaagcgggtgttcgccgtgacggagacgctgcagatgggggtctaccacttctcaggattgtttgtcctgctgtgcctcgggctgggcagcgcgcttctcacctctctgggtgagcatgtcttctaccgcctggtgctgccgcgcatccgcaggggtaataagctgcagtattggcttcacacgagccagaagatccaccgagccctcaatacaggaccacccgaggggcaacaggagagggcagagcaggagcgcagcggccccaaggacgagctgcctgccaccgatggtgcagggcgctggaggcgggtgcgccgggctgtggaacgggagcgacgcgtgcgtttcctgctggaacctggggaggctggcggagaccgcccgtggctctgctccaacgggcccgggctgcaagcggagctgcgggagctggagctgcgcattgaggctgcacgggagcggctgcgcagtgcgctgttgcggcgcggggagctgcgggccctgcttggggatggcacccggctcaggccactgcgcctgttgcatgcggcgcctgctgagagctgaggaaccacaaggccgcactgtccacgacagtttattctatatacaaacacgactctgtacactgcaattaaatagcgtggaacgtgaaaaaaaa

SEQ ID NO: 3936 - DNA, 2129 bp, Rattus norvegicus
  Genbank Accession No. NM_133315
gaggccgctcgagagcaggcttagggtctactgcggccggtggaccctccaacccgcttccataaggctttagctttccaacttcagctacagtgttagctaagtttggaaagaagacataaagaagaccccggtgggcagctttgctgttctttgccttagttgtcctttggggtctttcggcacaaggctgctgtgcttatagccgtgctatctccggttcctcacactcctgtgaagaagccctgggcaagagcagctaaagctactagcatccgaacaaacaaggggagagcgtctggtgccatgaccaagtcaagagatcagacccatcaggaaggatgctgtggatctttagcaaactacctgacctcagcaaaattcctcctctaccttggccactctctctccacttggggggatcggatgtggcactttgcagtgtctgtgtttctggtggaactctacggaaacagcctcctcttgacagctgtctacgggttggtggtggcaggctctgttctggtcctgggagccatcattggtgactgggtggataagaatgccagacttaaagtggcccagacgtccctggtggttcagaatgtatcagtcattctctgcgggatcatcctgatgatggttttcttacacaagaatgagcttctgaacatgtatcatggatgggtccttactgtctgctacatcctgatcatcaccattgcaaacattgcgaatttggccagtactgccactgcaattacaatccaaagggactggattgttgtcgtagcaggagaaaacaggagcagattagcagacatgaatgctaccattagaaggattgaccagctaaccaacatcctggcccccatggctgttggccagattatgacattcggttccccagtcattggctgtggtttcatttctggttggaatttggtgtccatgtgtgtggagtacttcttgctctggaaggtttaccagaagacccctgctctggctgtaaaagctgctctcaaggtagaggagtcagaactgaagcagctgacctcacctaaagatacggagccaaaacctttggagggaactcacctaatgggtgagaaagactctaacatccgtgaacttgaatgtgaacaagaacccacctgtgcctcccagatcgcagaacccttccgcacttttcgagatggatgggtctcctactataaccagcccgtatttttgggctggcatgggcctggctttcctctatatgacagtcctgggcttcgactgtatcgccacagtatatgcttacactcagggactgagtggttccatcctcagtgttttgatgggagcatcagcaataactggaataatgggaactgtggccttcacttggctacgtcgaaaatgtggccttgttcggactggtctgttctcaggactggctcagctttcttgtttgatcttgtgtgtgatctccgtgttcatgcctggaagccccttggacctgtctgtttctccatttgaagatatccgttctaggtttatacatgaggaggcagtgtcctcaactaccaaaatacctgaaacggaaatgcttatgtctaatgtgtctaatgttgtcaataccgtccatgagatgagtactaaatccgtccccataatctccgtcagcctgctgtttgcaggagtcattgctgctagaatcggtctttggtcctttgatttgactgtgacacagttgctgcaagaaaatgtaattgaatcagaaagaggcattatcaatggtgtgcagaactccatgaactaccttctcgaccttctgcatttcatcatggtcatcttggccccaaatcctgaagcttttggcttgctagtattgatttcagtcycctttgtggcaatgggacatcttatgtatttccgttttgcccsgaagactctgggcaaccagatttttgtttgtgctcctgatgaaaaggaagttacagatgaaagtcagcctaatacatctgttgtgtaaaatagtttagctgtggcccctgttactagatttgtggagagcatgtgtgcttattttgtactacagaattccaataaatgcctgcacttttaaaaaaaaaaaaaaaaaa

SEQ ID NO: 3937 - DNA, 3576 bp, Rattus norvegicus
  Genbank Accession No. NM_133380
gcgtccgggcggcgtaggaaaccgggcgaggtccttcgcgcaggaaagccccgcacggcgcgtggagcctgaacacacaggtgctggagagggagcccaggatctgggggccaggtacgctgccactgagctgcattccagtctctccctgtatagcccaggcacctttgtgtccgcaatggggtggctttgcaccaagttcctgtcctccgtgagctgtctgattttgctatgggtgactggctctgggggcatcaaggtcctgggtgaccccacctgcttctctgactacatccgcacttctacgtgtgagtggcagctggatagcactgtggactgcagttctcagctcctcctggactacaggctgctctttgagttctctgaaaacctcacatgcacccccaagaacagtgccgacaccgtgtgtgtgtgccaaatggccatagaggagccgatccaggcagacacatactggctggaactgtggtctgagcggggacagctgtggcaaggctccttcaagcctagtgacaatgtgaagcccccagctccagacaacctcacactccacaccaatgtctccaatgcgctgctgctgatgtggagcaacccatacccatcgaacaacttcctgcacaaaggcctcatctgcatggtcaacatctccagagaggacaacccggcggaattcaaagtctataatgtgacctacacggaacccaagctgagcttcccagtcaacaccctaacatcaggggtgcgctatagggcacgtgtgagggtcttgtcccagagcttccctggcatctggagtgagtggagtcccagcatcacgtggtacaacccaaataatgtcaatctgtgactgaatgaccttgggggctccagtggtgaggagagcacacagagcagtggagctgacttccagctgcccctgctgcagcgcctcccgctgggtgtcagcatctcctgcatctgcatcctattgttttgcctgacctgttacttcagcattatcaagattaagaagatatggtgggaccagattcccactccagcacgcagtcccttagcagccatcatcattcaggacacgaaggtgtccctctgggagaagcagacccgaagccaggagtcaaccaagagccggcactggaagacttgtctaaccaagctgctgccctgcttgctggagcatagagtgaagaaagagagagaatccccgaaggctgccaaaaccaagcctctccagagtcctgaaaaagcaggctggtatcctgcggaggtcagcaggaccgtcctctggccagagaacgttcatgtcagtgtggtgcgctgtatggagctgtttgaggccccagtacagaatgtggaggaggaagaggatgagatggtcaaaggggacctgagcatgtcacctgagaacagcggagggggcttccaggagagtcaggcagacatcatggcccggctcactgagaacctgttttcagacttgctgggggctgagaatggaggcgttggccagtcgagcatggcagagtcatcctcccttctgccttcagaaagtgggcaagcttctacgtcctgggcctgcttccccacggggcccagtgagaccacatgccaggtcacagggcagcagcctccacacccagaccctgagagagcaactggcacagcctgcacacaggtcccccttgtcatttcagacaatcctgcctaccggagttttagtgacttctccagccccgccccaaatcctggagagctggcttcagaacagaagcaggctggacatctggaagaaggggatcttctgagcccggttgacccccattcttcagggccaccaatgcagcaagcggagagctgggagcagatccttcacatgagtgtcctgcagcacgggacagctggctccaccccagcccctaccagtggctaccaagagtttgtgcaggcagtgaagcagggtgcgtcccaggacgctggggtgcctggtgtcgggccttctggagacactggttacaaggctttctcgagcctgctcagcagcagtggcgtctgcacggacacagcagcagcagggactgacagtggatgtggagggtacaagcccttccagaaccctgttcctaaccagtcccccaactccatgcccttattcaccttcggactggacatggagctgccacccagtcccctgaactcagccccacccaatagcaccccagaatgccttggtctagagctggggctcaaaggaggcacctggctgaaggcccctcctccttcagagcaggtgcccaagccctttggggatgacctgggccttggcattgtgtactcgtccctcacctgccatctgtgtggccacctgaagcaacaccacagccaggaggaagatggtcagatccatgtcgttgctagccctggctgcggctgttgctatgatgaaaaatcaccatccttggggaatctctcggggaccttggagagctgtcctggggaaatgtcacaggaagccaacctcaccttagcacccaggacaccctccaatttgtcaggggtgggcaagggccctggccactctcctgttcccagccagactactgaggtacctgtgggcactctgggcgtcactgtgtcttaggtgagtgtgctgttgttgctgaggtctgtgctaaggccggggttcctccaagccagggaagtgcttcctgagagacagcccagctggcaggtttcccagaaatcgaaagaatggtgaagtgaagatgtgaacttggcctgaccctagaagttcagagcctggctgtctcccctaccgttggcctgggctctcctccctcacaagggattcagggactcattttgctttctcccacagcagtgctgatattcttaagccctgggctctcctagctcttgttgccctacctgctcaggcccattctgtccacccaatagaccgtttgcccaaggctcacagcagtcctggcatagctgtcgggttctccagctggaagctggtcctagaaactcgcagctggcctggcagtggcttgggaggccctaactagtggaaattttgagttaagggagggtagatactgccccaaggaggctattcattgaacagctcggactgagactagaagcagagcctgctgtcccagcttggcccagttgtggaaagcaacaagaacgcaaacttgattgcccaaagtcactgccagttacccacatgtggccagaagccagggctcccaggatgtggaagtgggatcccagtaaacaaacacagcagcctagtggcaggtcccagtggacaccaccactggcagccaaggcgagaccacaagggaactgtggggctggttctggttggtggccagatgatagggatggcagatggcagactgcagtctgactgcattctggaggacgggaccaggctcaggactgtctgctcgtgtccctacctttgggacacctagtatgtttgcaaggagggcaggacagaagaggtcacgtggagctctatgtcaataaagactctttatcttg

SEQ ID NO: 3938 - DNA, 2677 bp, Rattus norvegicus
  Genbank Accession No. NM_133394
ccagctccgcgtcgggctcccgcttctgctggtccgctgcctcccgcacacctgccgggccggaccgagccgaacggaactgagcggatccgggtccacccggccgggccatgagcgctgccgcatgatgcgtcgccgcccgcgccgctgcagccgccggccgcgaggagcctcagcactgggcgaccccgcccgggcctcgggccacatcacacaggacagcatgcggcttacggtcctgaaaaaaaggcacaagtgctcccatgatgcttagaagcaacttgtaaggctgtgccagggaatcatgcagccgtcaggacacaggctccgggacattgagcaccatcctctcctgactgacaatgacaattatgactctgcgtcctcctcgtcctccgaggctgacatggcagacagggtgtggttcatccgagatggctgtggcatggtctgtgctgtcatgacatggcttctggtcgtctatgcagactttgtggtgaccttcgtcatgctgctgccttccaaagacttctggtactccgtggtgaacggggtcctcttcaactgcttggcggtgctcgcgctgtcctcccacctaagaaccatgctcactgacccgggggctgtccccaaaggcaacgccacgaaggagtacatggagagcttgcagctgaagccgggcgaggtgatctacaagtgccccaagtgttgctgcatcaagccggagcgtgcccaccactgcagtatctgcaagaggtgcattcgaaagatggaccaccactgcccgtgggtgaacaactgtgtgggagagaagaaccagcgcttcttcgtgctcttcaccatgtacatagctctgtcttcaatccatgctctgattctctgcgggcttcagttcatctcttgcgtccgagggcagtggacagagtgcagtgacttctctcctcccataactgtaatcctgttggtcttcctgtgccttgagggcctcctgttcttcactttcaccgcagtcatgttcggcacccagatccactcaatatgcaatgacgaaactgagatcgagaggctgaagagtgagaagcctacgtgggagcgaaggctgcggtgggaagggatgaagtctgtcttcgggggccctccctccctcctctggatgaacccctttgtgggcttccgattcaggcggctgcagatgaggaccaggaagggaggccccgagttctctgtatgagccttcagggcaggatgtctgcagacatcatactcagtggccgcaagcacagcagccttgtgggcagatggagctggccagcagacggggccatgagcacttcatggacctagggccacaggcacttgtcatttctgtgtgtactgccaggagaagcagtcccgggaggccatcctgaccatcctgacccaggatgtctcgtgggctgcgagcacccacagcacaggtgccgttgcttcttggtcatgaaggaagccagcacagcagctgctggggtcctgctggcccatccccagcgcacttcttactggaaggggtttccacagagactctggcttggagggctctgacacctagcactgaacagtcaaagcggcttccagaacactccatgctgccccagaacgggcatcctttgacccttccagcaagtctgtgtgtgctcatctgtgtgtctgtgtggtgtgtgtgcgtgagcatgtgtcagaatcagcagtgttgttcaagcacgcgtgtggtagacaagctgtctttcagactccagtgtttcagggaagtgggacgcactgctggcccttgctggcctcctatgaatgtatcctccagtgtccagatccaaagaacaggcatgcctgcgcatgggcccggcctcctgcttttatttcactgaaaacttagtgtttgagggcatggagctgaggttttgttgttccagccaaactagccactgcaacattcttctcaacaaggaaagtggtagccctgtgctgagacccagcactgtggggcaggggctgtggggagctcagcatgagaagccgccttgggcccctttggagaggtgctgcaggctgagacagcccggtgcctgagctatcaagagtggggacatgtgactatttctttacccatggcacttcagtcagtggacccttggtgtgggcttagtattatgtcagcacacacagctcccctcaggggacttgccttaaactcgtaggttgtcctttgctgctgggtgaaagcagtctgacagaagctggggacttccgagagtgttctcccatgcagacaccagtgtttcccttctgggaccagctgcctttctgtccccgtgacaccatgactgttctttcggtgtcagtcgcttgtgccctgcccttgtctgggctcctatgctactgaggtgaacccgggggacctgagccctctcatgcagtgagcaaactctggggcctgagtccctgcagagggacatcgtggcttcagattgtctctgcgttcctttgcacatgtgtctgggcatgtaggctctggcagtctcaccctccagtgtggagtccgtggcggtgaatccaagctgagtatacttgacttttcaattcctcagtgtgattttatatgaaataaagtaacccgtccacagttcaaaaaaaaaaaaaaaaa

SEQ ID NO: 3939 - DNA, 2234 bp, Rattus norvegicus
  Genbank Accession No. NM_133398
agccattgttccgccgggggaggacaagcgaggcctggcgctggcgccccgacgccacttagcggccgcctctggagacactctgtccccgccgccccgtgtcctcctggcggcggcggcgtgaggccgactggagggagtgggaaccctcggccctccccgtggcggcggcggccacctattccccactctggagtgaggggcggccgcgatgcgcttggcctaaggtgtcgcggccctcgtcgcttcccacgactgttccagcggcgtctgtgctccccggcgtcatcccgagagtctctgacgggagggaagatggctgcacgaagctggcaggacgaactggctcagcaggccgaggagggctctgcccggctgcgggagttgctctctgtcggcctaggttttctgcgcacggagttgggcctcgacctggggttggagccgaagcggtacccgagctgggtgatcctggtgggcaccggcgctctcgggttgctgcttctcttcctcctaggttacggctgggccgctgcttgcgccggcgcccgcaaaaagcgaaggagcccgccccgcaagcgggaggaggtgaccccgccgactccggcccccgaggacccagcccaactgaagaatctcagaagcgaggagcaaaagaaaaagaaccggaagaagctgcctgaaaagcccaaaccaaatggacggactgttgaaatacctgaagatgaagttgttagaactccccgaagtataactgccaagcagccaccagagacagacaagaaaaatgaaaagtcaaagaaaaataagaagaagtcaaagtcagatgctaaagcagtgcaaaacagttcacgccatgatggaaaggaagttgatgaaggagcctgggaaactaaaattagtcacagagagaaacgacaacagcgtaaacgtgataaagtgctgactgattctggttcattggattcaactatccctgggatagaaaataccatcacagttaccaccgagcaacttacaactgcatcatttcctgttggttccaagaagaataaaggtgattctcatctaaatgttcaagttagcaactttaagtctggaaaaggagattctacacttcaggtttcttcagggttgaatgaaaatattactgtcaatggaggaggctggagtgaaaagtctgtaaaactctcctcacaattgagtgcaggtgaggagaagtggaactctgtcccacctgcttctgcaggcaagagaaaaacagagcagtctgcttggactcaagaccctggtgatactaatgcaaatgggaaagactggggaaggaattggagtgatcgctcaatattttctggcattggatctactgctgagccagtttctcagtctaccacttctgattatcagtgggatggtagccgtaatcagccccatatcgatgatgaatggtctgggttaaatggtttgtcttctgctgatcctagctcagactggaatgcaccagcagaagagtgggggaactgggtagatgaagatagagcttcacttctgaagtcccaggagccgatttctaatgatcaaaaggattcagatgatgataaggaaaaaggagaaggagctcttccaactggaaaatctaaaaagaaaaaaaagaaaaagaagaagcaaggtgaagataactctatcacccaggacacagaagacctagaaaaggacactagagaagagcttccagtgaatacctcgaaagcccgtccaaaacaggagaaagcttgttccctgaagaccatgagcactagtgatccagttgaagtactcatcaaaaatagccagcctatcaagactcttccacctgctatctctgccgagccatctgttactttatcaaagggtgactctgacaagagctcttcccaagtgccaccgatgttacaagacacagacaaacccaagtcaaatgctaagcaaaacagtgtgcctccctcacagaccaagtctgaaactaattgggaatctccaaaacaaataaaaaagaagaaaaaggccagacgggaaacgtgaatttttttcctaaattggacatgtgtttacaaacactgtcttgaagattatgctgtttatgcaataatttgtgaacatgtacagagttttatataaatttaaaccaatttttaaaacaaaactgaacacaaccaccataaaatggaatcaaagggaaagttaatttatgaaat

SEQ ID NO: 3940 - DNA, 1292 bp, Rattus norvegicus
  Genbank Accession No. NM_133417
aaaggaagtggagaaggctgtaatggcggctgtgactgaagttgtggtaccctcggacggcgcggaagccaggcccttggcggccgaggagctggcggcgcagaagcgagagcagagactgcgcaagttccgtgagctgcatctgaagcggaatgaagctcgtaagttaaatcaccaggaagttgtggaagaagacaaaagacttaagctgcctgctaactgggaagccaagaaagcacgtctggagtgggaactccaggaagaagaaaagaagaaggagtgtgcagctcgaggggaagactacgagaaggtgaaactgctggagatcagtgcggaggacgctgagaggtgggagaggaggaagaagaagaagaaccctgacttggggttttcagattatgctgctgcccaattgcgccagtatcaccggctgaccaagcagatcaaacctgacatggaaagctacgagcgacagagagaaaagcatggagaagattttttcccgacatccaacagtcttctccatgggacgcatgtgcctttctcagaggaaattgacagaatggttttagatctggaaaagcaaattgaaaagagagacaaatacagccgaagacgtccttacaatgacgatgccgacatcgactacattaatgagaggaacgccaagttcaacaagaaagcagagaggttctacgggaagtacacggctgagatcaagcagaacctggagagaggaacagctgtgtgagcctgccctcgggagcagtacaggagctgggaaggggttggaggtggcccaggcaaattcaaactcccatgtgggactatttcctttacttacccctgcctccccgagggccttctgaaataaatgtcttttctcacctctcttcaacatgcacatgtccacattttcctgcttggatagaccatgtatttcttgtagtgagtgatgttttgtaaaaatctaatttgtataaatccaattattatttttctatgtattttaaatgtgcatgaccatatatccttgaattactggggcgtaatggttgtgtacacagtgcagtcactgctgctttgagtgttcttaggaagtagaagctacagtcgggctttggggctgtccaggaaaggactaggaagcagaggctgtcaagacagatgctcctggagttctggcactgtcttcccgggctggagtcaaggccatggctgtgagcctctcacactctctttttaaaaacaataaagtgctttggaatagaaaaaaaaaaaaaaaaaaaaaa

SEQ ID NO: 3941 - DNA, 1946 bp, Rattus norvegicus
  Genbank Accession No. NM_133418
ccggggtcgggccaggtcgctgctgctctggccatggctgaggcacgcacgtctcgctggtactttggagggctggcttcctgcggagctgcctgctgcacgcaccctctagacctgctcaaggtgcatttgcagacccaacaggaggtgaagcttcgaatgactggaatggcactgcaggtggtgcgaaccgatggcttcctggcactctacaatggcctgagtgcctcgctgtgcaggcagatgacctactccctgacccggttcgctatctacgagaccatgcgggactacatgaccaaggacagccaggggcctctccccttctacagcaaggtgttgctgggcggcatcagtggtttaactggaggcttcgtggggaccccagcagatttggtcaatgtcaggatgcagaatgacatgaagctgcctctgagccagcgccgcaactactctcacgccctggatggtctgtaccgtgtagcccgtgaagaaggcctgaagaagctcttctctggagcaactatggcatccagccgtggggccctcgtcactgtgggccagctgtcctgctacgaccaggccaagcagctggttctcagtactgggtacctgagtgacaacattttcacccacttcctctccagtttcattgcgggcggatgtgccacatttctctgccagcccctggacgtgctgaagactcgcttgatgaactccaagggcgagtatcagggtgttttccattgtgccgtggagacagcaaagcttggaccacaggcctttttcaagggtctcgttcctgcgggcgtccgtctcgtcccccacaccgtgcttaccttcatgttcctggagcagctgcggaagcacttcggtatcaaagtggcaacctgacaccgccagggacacctgggctgcgctcagtcgctgtgctgagccccttggaagagtaggaagggagtgggctcccttcctccttggcctgggcccgtgctgatccccagaagattcctgttcttcccacccttgggctgctggctacgccttccgaccctgccttggccccactgaagtggcacctctgccctactggctcccaggctctccccactgggacgtcccatcttcctacccgatgattcactcagaagaggtctggcctggctggtgtcactgtccccacctccctggctgctaccctgccctgcctgtcaagcccggagaagctgagtacacttcctgctcttgctggcccactgaacagcttccacccaggacttgggtagtgtggcagggtacagcccctggcagcttctgcttaccaaatgactagagcacgcacgcacacacatacacacatgcacttacgtcacaagagggaccaccgtgcagtgttctggaaggtagtgccttcaggagagggaacagggcagcagcacagatcaccagcaaacgccatgaccgcggagtccggagaaagtacctggggttccctgtgcacctcccgtgctcagccttggctgctttaagagtcagtttttgcggaaccctcctactcagcagccactaccatcatcaggaactggctgtgtccctcatacacctgtgccctcccttgcctggcttcccccagggccaggggctcatgctggagctggggctatgatggattcattttatgtgtcctcctaggacctgttttcccgtatggcaggggtcacccctcaccatccctcagggttcaaagcagcctgttttccctcaaattggggttgtgtgtatatcaacgtgaggttgggccctgtgcccgtttgcctcccctcagcaccaggccctcacccaggaggtgcgggaggtggcagtgggcccaggggcactgcctacatctctcttcaggatctaataaaccaagtggccaaaaaaaaaaaaaaaaaaaaaaaaaaaaa

SEQ ID NO: 3942 - DNA, 2968 bp, Rattus norvegicus
  Genbank Accession No. NM_133423
atggcggccgacagccgggaggagaaagatggggaacttaatgttttagatgatattttgactgaagtaccagaacaggatgatgaactgtataatccagagagtgaacaagataaaaatgagaaaaaaggatcaaaaagaaaaagtgaaagaatggaatctattgacaccaagcgacagaagccttctatccattcaagacaactgatttctaagccactaagctcatctgttagcaataataaaagaatagttagtacaaaaggaaagtcggttacagaatataaaaatgaggaatatcaaagatctgaaaggaacaagcgtctagatgctgatcgaaaaattcgtctgtcaagcagttcctctagagaaccttacaagagtcaaccagaaaaaccttgtctacggaaaagggattctgaaagaagggccaagtctcctacaccagatggttctgagagaattgggcttgaagttgatagacgtgcaagcagatccagccagtcttcaaaggaagaggggaactctgaggagtatggctctgaccacgagacaggaagcagtgcttcttctgaacagggcaacaacactgagaatgaggaggaaggaggggaagaagatgtagaggaagatgaagaggtagatgaagatggagatgatgatgaggaagtggatgaagatgcggaggaggaggaggacgaggaagaagatgaggaggaggaggatgaggaagaagaagaggaagaggaagaagaatatgaacaggatgagagagatcagaaggaagaagggaatgattatgacacccgtagtgaggccagtgattctggttctgagtctgtttccttcacagatggatctgtcaggtctggttcaggaacagatggatcagatgagaaaaagaaggaaaggaagagagctcgaggcatatcacccattgtctttgatagaagtggcagttctgcatcagagtcatatgcaggttcagaaaagaagcatgagaaattatcatcttccgttcgtgctgtccgaaaagatcaaaccagtaaactcaaatctgtccttcaggatgcaagatttttcctcataaagagtaacaaccatgagaatgtgtctcttgccaaagcaaagggtgtatggtccacattacctgtaaatgagaagaaattaaatcttgcgtttagatctgcaaggagtgttatattaatattttctgtcagggaaagtggaaagtttcaaggttttgccagattgtcatcagaatcgcatcatggtggctctcctatacattgggtgcttccagcaggaatgagtgctaaaatgcttggaggtgtttttaaaattgactggatttgcaggcgtgaattaccctttactaagtcagctcatctcaccaatccctggaatgaacataagccagtaaagattggacgtgatggacaggaaattgaacttgaatgtggaacccagctttgtcttctgtttccccctgatgaaagtattgacttgtatcagctcattcataaaatgcgtcacaagagaagaatgcattctcagcctcgatcaagaggacgtccatcccgtcgagaaccagtccgggatgtgggaaggcgtcgaccagaagattatgatattcataacagcagaaagaaaccaaggattgactatccccctgagtttcaccagagaccagggtatttaaaggatccccgataccaggaagttgacagtttcacaaatcttattcccaacagacgattttcaggagttcgccgagatgtgtttttaaatgggtcctacaatgattatgtgagggaatttcataacatgggaccaccgcctccttggcaaggaatgcctccttacccgggaatagaacagcctccacaccatccctactaccagcaccatgccccgcctcctcaagcccaccccccttactcaggacaccatccggtaccacatgaagcaagatacagagataaacgagtacatgactatgatatgagggttgatgatttccttcgccgcacacaagccgttgtcagtggtcggagaagtagaccccgagaaagagatcgggagcgagagcgagaccgccctagagataacagaagagatagagagcgagacagaggtcgtgatcgagaaagagagagagaaagaatatgtgatcgggacagagaccgaggggaaagaggtcgttatcgaagataatgtgctttttggaagcactgactgaagataaaaaatattgtattttttttgtgtgtgtttacaagtagtaaatttattttcagctgtctacttaaagctcattgtgtagaaggatttattatcttctttgttccaagcatgcagtagaataagaactggaaaactcagatccgccaaaaaatgcacagttgacagttgagttgacacttttattggggcagaatggaacagtccaagaatgtagatattgattcattctccataaatgttctttttacagtgtattcatcctagagttattttgtttgtttgttttccttcttttggaccttggtcaatactgccatagtattttgctttgtgtttctataggtagctgcacacggttcagtaaaaataatgctgctatcaagtatgcagatattgagtatgatggtttgactatatggcagtgttgtagcagcctctcggtttctcctcttccctccttttttttaaacctataaatccactttttttttaagtcttcaatgatgagagcaatattaagaagacattgctatctaatttttaatctttttaaataaaacgttcctatgttcagtagcatggtcgatgctattgtttagccttccttccaaactgtacattggcttggaatgttcagttttgcgtgtgtggcagcagaagataaccccacattctacattgctactgttttgtatgaaataaattggtaaagattgacact

SEQ ID NO: 3943 - DNA, 564 bp, Rattus norvegicus
  Genbank Accession No. NM_133525
gcgcgcgcgcaccgcgggcgatggcggcatccggggagcaggctccatgctccgtgtacttctgcgggagcatccgcggcgggcgcgaggaccaagcactgtatgcgcggatcgtgtcgcggctccgacgctatgggaaggtgctcactgagcacgtggctgatgctgagttggagccgcttggggaagaggctgctgggggtgaccagttcatccatgagcaggacctgaactggctgcagcaagcagatgtggtagtggcggaagtgacacagccatccttgggtgttggctatgaactgggccgggcagtagctcttgggaagccaattctgtgcctgtttcgaccacagtctggccgagtgctttccgccatgatccgcggagcagcagatggctcgaggttccaggtatgggactacgcagaaggagaagtggagaccatgctcgatcggtactttgaggcatatcttcctcagaagacggcttcctccagtcacccaagtgcctgaccaccctactgtattaaaaagaaaattaagatttaaaaaaaaaaaaaaaaaa

SEQ ID NO: 3944 - DNA, 1102 bp, Rattus norvegicus
  Genbank Accession No. NM_133539
aattcggctcccacggccgcgtctaccgccgcctgggcctcggtcccgagtcccggatccaccttctacggaacttgctcacaggcctagttcgccacgaacgcatcgaggcgacatgggcacgcgtggacgagatgaggggctacgcggagaagctcatcgactatggaaagctgggagacaccaacgaacgagccatgcgtattgctgacttctggctcactgagaaggacttgatcccaaagctgtttaaagtgctagcgcctcggttcccaaagggtcagaattgcaactacacaagaatgctacagatcccgaatcgaaaggaacaagatcgggccaagatggcagtgatagaatataaggggaactgcctccctcccctgcctctgcctcacagagatagcaaccttactctcctaaaccagctactcctgggactgcagcaggacctgcaccataaccagaaagcaagcctccacagctcccatacagtcaaacaccaaagacttaactggagctggagagtgcataggtgtggtacctgtgttggtgggtcttggagctcttgtagtgtgtgcgaccttgaagtggcattgtggagccccctcataatgaggcccagacctccctgctgcctagaattgatcctctttgcacagtcgataaaatccttgatatgcatatacgacactgactttcttttccttccctcggatttctggaacataaggaacatgcagatgctcagcctcctacgacagtaaatccactgctttacctttctgagtcttaggtccagttttgctttgctttttggtggggagagggtcttgctgtgtaatccaggttgcatctaccatgcagcagtcctcctgtcccttttgcccaagtgctgggcttgaaggtgttcaccaccacacagtgccagtttgcttatgttttgtttatatttttctgagacagagtttctttggctgtcctggaactctctttgtagaccatgctggacttgaactaagaaatccacatgcatttgcctcctgagtactcctgagtactgggattaaaggcatgggacacaaaaaaaaaaaaccgaatt

SEQ ID NO: 3945 - DNA, 813 bp, Rattus norvegicus
  Genbank Accession No. NM_133540
tgacaaagtcactgcttgctggctgtttctctggctcagtggactagaagtccaggtgcatggccttttcctttttctaagagccaacactctgggtcatctgtgtctttgtcccctaagaagtggaaacccagagctgtgtccatggagccctaccggtccctggccctgcttgctggctgtctgggcctgattttttcactgattgctctgagcactgacttctggatagtggccaccggccccaacttctctgcccactctggcctctggccaacaagcccagggactcaagtagcaggttatatccacgtgacacaggtctgctgtatcctggctgccctgtggggcctggtatccgtgagcttcctggttctgtcttgtatcccatccctgtctgctcctggccgtggccctatggtctcaactgtcttgtcttttgctgcagctctctccatcatagtggccatggcagtgtacaccagcgagagatggagccagcctccatctccccaggtccagacattcttctcctggtccttctacctaggctggggctccgccatccctttcctctgtgcaggctgcctgagcctgggtgctcactgtagaacccgtcggactgagtacgaaaccttgtgaacagaagccaaggacatcagggtcagcaggatgtttggagccttgtcctctcagaagctataaaaggaaggcagaattctgtttctgtccctcccaccttgccttatccctcaattgctttcttcacacactcaataaaagcatgccgagatctaaaaaaaaaaaaaaaaa

SEQ ID NO: 3946 - DNA, 322 bp, Rattus norvegicus
  Genbank Accession No. NM_133544
gtgatcggacgaagaagattgaagtcatggctggcccagaaagtgatggccaattccagttcactggtattaaaaaatatttcaactcttataccctcacaggtagaatgaattgtgtcctggccacatatggaggcattgctttgttggtcctatactttaagttaaggcctaaaaaaaccccagctgtgaaagcaacataaatggattttgaaatgtctggccttatctgttaagtcccacgcctgaagaagctgatgtgaactcatcatgtaatactcaatttgtacaataaattatgaacctggaaaaaaaaaaaaaa

SEQ ID NO: 3947 - DNA, 2225 bp, Rattus norvegicus
  Genbank Accession No. NM_133546
ctgcagtacttgtacattgctaaataaagagagggactccaggaggagcagcctgggtctaagaggtaggcagaaggaggttttaggggcctgagcacaagcttgaggagagaaaggttattaaaaagccagacgcttacaggtctcagaagggctagccagaaactgtggctggggttaaggaaagggtttaagagtgtgggcttttggttctgaggatgtagaacgtgaatgttgagagaagaaccaagtggcggagttgggtgtgagcaatgctattaggaatttgaggcagggattcacgcgctgctgtgactattttttaacaatgactcagtgctgtgacctgatactgtttccagagcgacttctaaacaaattccccctttctaggccagacacatggccccaagcccaagaccccagcatgtcctgcactggaaggaagcccactctttctacctcctgtctccactgatgggcttcctcagccgggcctggagccgcctgagggggcccgaggtctcagaggcctggttggcagaaacagtagcaggagcaaaccagatagaggctgatgctctgttgacgcctcccccggtctctgaaaatcacctacctctccgagagactgaaggaaatggaactcctgaatggagtaaagcagcccagaggctctgccttgatgtggaagcccaaagttcccctcctaaaacttggggactttcagatattgatgaacataatgggaagccaggacaagatggccttagagagcaagaagtggagcacacagctggcctgcctacactacagccccttcacctgcaaggggcagataagaaagttggggaggtggtggctagagaagagggtgtgtccgagctggcttaccccacatcacactgggagggtggtccagctgaggatgaagaggatacagaaaccgtgaagaaggctcaccaggcctctgctgcttccatagctccaggatataaacccagcacttctgtgtattgcccaggggaggcagaacatcgagccacggaggaaaaaggaacagacaataaggctgaaccctcaggctcccactccagagtctgggagtaccacactagagagaggcctaagcaggagggagaaactaagccagagcaacacagggcagggcagagtcacccttgtcagaatgcagaggctgaggaaggaggacctgagacttctgtctgttctggcagtgccttcctgaaggcctgggtgtatcgcccaggagaggacacagaggaggaagaagacagtgatttggattcagctgaggaagacacagctcatacctgtaccaccccccatacaagtgccttcctgaaggcctgggtctatcgcccaggagaggacacagaagaggaagatgacggtgattgggattcagctgaggaagacgcgtctcagagctgtaccaccccccatacaagtgccttcctgaaggcctgggtctatcgcccaggagaggacacagaagaggaagacgacagtgagaatgtggccccagttgactcagaaacagttgactcttgccagagtacccagcattgtctaccagtagagaagaccaagggatgtggagaagcagagccccctcccttccagtggccttctatttacctggacagaagccagcaccaccttgggctgcccctaagctgccccttcgactgcagaagcggctcagatctttcaaagcccccgcccggaatcagggccctgagattcctctgaagggtagaaaggtgcacttctctgagaaagttacagtccatttccttgctgtctgggcaggaccagcccaggctgctcgtcgaggcccctgggagcagtttgcacgagatcgaagccgctttgctcgacgcattgccaggcagaggagcagctgggtccttaccttacccctgctttcagggccagagcatggacacgccttagaaacctaccccttcctctgtcgtcctcgtctcttccactgcctgagccttgctcttccactgaggccacacccctcagccaagatgtgaccactccctctccccttcccagtgaaatccctcctcccagcctggacttgggaggaaggcgggctaagcctgagtagttttttgtgtattctatgagtgttagtctcttaatacgaatatgtaacgccttttgcatttgtaaaaaaaaaaaaaaaa

SEQ ID NO: 3948 - DNA, 593 bp, Rattus norvegicus
  Genbank Accession No. NM_133556
gcccctcacccctgaaaaatgtatgcctgctccaagttcgtctctacccgctccctgatcaggagcacctctcagctgctgagccgtccgctctctgcagtggagttgaagcgaccacagatgcccacagatgagggcctcagttgcttggcagtccggcggcctctgacctcgcttatccctagccgcagcttccaaaccagcgccatttcaagggacattgacacagctgccaagttcattggagctggggctgctacagttggggtggccggttctggagcaggaattgggactgtttttgggagtctcatcattggctatgccaggaacccctctctgaagcagcaactcttctcctatgcgattctggggtttgccctctctgaggccatggggctcttttgcctaatggtggccttcctcatcctcttcgccatgtgaagcagctgtctccacgtccacctcccatggttcttccgtgtctcgtctgcccagtgtgttccttttcctgtgcctccccaacaagtctggggaaagtacttggctcagggtttgacagagagaagacaaataaatactgtattaataag

SEQ ID NO: 3949 - DNA, 901 bp, Rattus norvegicus
  Genbank Accession No. NM_133561
gctggccgggtcgaccctggtgtcatccgtttaggaagcggcttcaccgccaacagcacggccatggctggagctctggtgcgcaaagcagcggactatgtccggagcaaggacttccgggactatctcatgagtacgcacttctggggcccagttgccaactggggtctccccattgctgctatcaatgacatgaagaaatctccagagattatcagtgggcggatgactttcgccctctgttgctattctctgacattcatgagatttgcctacaaggtacaaccccgaaactggcttctgtttgcgtgccatgtgacaaacgaagtcgctcagctcattcagggaggacgacttatcaactacgagatgagtaagcggccatctgcctagcagtgcaaggaccagctcttgaaagggacagtgctccagccactgttgcggccacagatcacgtcagcatgaatagtcgtgctgaggggaaaacacggaagactatctttaatgaccatgccaacattattgaatagccaagaatccccaaaccaactctcggctgccttatcaatgctaaactttatttgtcttcatcaggagtagttcaaaatatgcagctaatttaataattttgaatgatgttatctatagcaatctgtagtaatatgtatattatctattgggatttgtgtaataaaaaatctaagggaacaaaactttataactacaagcacttaagtcctcaaaattcttgactttttctttaatgactatagtataaccctcagttggtcacatgtctacacataatttccagtgataacaagtagcggtgttttccatatgtaattcagatctgaacttaatggcaataaatggtttaaatatttgcgaaaaaaaaaaa

SEQ ID NO: 3950 - DNA, 1281 bp, Rattus norvegicus
  Genbank Accession No. NM_133567
ggccgcgcagccatggccggggagcggcgccgggcgctgctggagctgctgacgcgtccggggaactcgcgctgcgctgactgcggagccccggatcctgactgggcgtcctacaccctgggtgtgttcatctgtttgagctgctctgggatccaccggaacatcccccaggtcagcaaggtgaagtcagttcgtctggatgcctgggatgagacccaagttgagttcatgacatctcatgggaacgaggctgccagagccacatttgagtccaaagtaccacccttctactaccggcccacgttctccgactgccaactcctacgtgagcagtggatccgtgccaagtatgagaggcaagaattccttcatgtggagaaacaggaaccgtactctacaggataccgtgagggccttctctggaagcgtggccgggacaacggacagttcttaagtcggaagtttgtgctgacagaacgagagggtgctctgaaatacttcaacaaaaatgacgctaaggagcctaaggctgtcatgaagattgagcacctgaatgccaccttccagccagccaagatcggccacccccatggcctgcaggtcacctacttgaaggacaacagcactcgcaacatctttatctaccacgaggatggcaaggagatcgtggactggttcaatgcgctgcgagcagcccgcttccactacctgcaggtggctttcccaggagccagtgacgcagatctggtgcccaagctctctaggaactacctgaaggaaggctacatggagaagacagggcccaagcagacagaaggctttcggaagcgctggttcaccatggacgaccggaggctcatgtacttcaaagaccctctggatgcctttgcccgaggggaagtcttcattggcagcaaggaaagtggttacacggtcctggagggcctcccaccgtcaacccagagtcaccactggccccatggcatcaccattgtcacccctgaccgaaaattcctgttcacgtgtgagacagagtcagaccagagggagtggatagcagccttccagaaggtggtggacaggcccatgctgcctcaggagtacgcagtggaagcccacttcaagcataaaccctaaggaagagagcccggaggccccaggattctgcactcgtgtggcggcgctggacagcaggagagcctctgttcctcggtgtggcccaggcatggccaggtggggctcaggcaagcccatcagatagacagatttttcagaacctca

SEQ ID NO: 3951 - DNA, 2804 bp, Rattus norvegicus
  Genbank Accession No. NM_133572
ggggggggggttatttttcgaatatataaggaggtggaggtggcagcagcccagctcgcgtcttcccctcccttcctccccacatccctctcctcactcccaggcccactgctcttcctccctccctcccctccctccttccccttaccccaggctcactctcggagcctagccagctgggtcggcgtctgctggcgcggtatcttgtggccctctagctagcctttgcccgccccgccaccatggaggtacccccgcagaagtctgcgccgggctcagctctcagtactgcccgcgtgctgggtggcattcagcggccgcgccacctctcaggctttgggtttgggtctgatggcttgctggggtctccagagcgtgcggcttcctcctctccggttaccactcttacccagaccatgtacaacctcgcagggctcggcagcgagaccccaaaaactcaagtaggaagcctgtcgttccagaacaggctgacagacctgtccctgtccagacgtacctctgagtgctccctgtcatctgagtcctcagaatcttctgatgcaggtctctgcatggactcccctagccctatggacccacagacagcagagcgcacgtttgaacaggccattcaggcagccagtcgggtcattcaaaagatgcaatttaccataaaagcttcggtctttgccagtgaggctgctggacatagtcctgtgctacagaacatcaccaactcccaagcactggacagctgggagaaagatgaagcaggctacagagctgccagtagtcctggggaggacaaagagaacgatggatatatcttcaagatgccacagaagctccctcattccagctctgcccgagctttggcagagtgggccagccgcagagaggcctttacccagaggcccagctcagcccctgacttgatgtgtcttaccactgacgggaagatggacgtggaggaggcgagccctgtggcacagtcttcctccttgactcctgtcgaaagggcttgtgaagaagatgacggatttgtggacatcctagagagtgatttaaaggatgatgatatggtccccgcaggcatggagaacctcattagtgctccactggtcaaaaagctggataaggaagaggaacaggatctcatcatgttcagcaagtgccagcggcttttccgctctccatccatgccgtgcagtgtgatccggcccatcctcaagaggctagagcggccccacgacagggacgtgcctgtcctgagcaagcgcaggaagagtgggacacccctggaagagcagcagcttgaagaacccaaggcccgggtcttccgctcaaagtccctgtgtcacgagattgagagcatcctggacagtgaccaccgtggcctgattggagattactctaaggccttcctcctgcagactgtggatggcaaacaccaagacctcaagtacatctcaccagaaactatggtggccctgttgacaggcaagttcagcaacatcgtggagaagtttgtaattgtggactgcagatacccctatgagtatgaaggcgggcatatcaagaatgctgtgaacttgcccctggaaccggatgccgagacctttctgctgaagcatcccatcacgccttgtaacctggacaagagaatcatcctcattttccactgtgaattctcatctgagcgtggaccacggatgtgccgcttcatcagggaacgggaccgtgcagctaacgactatcccagcctgtactaccctgagatgtacatcctcaaaggcggctacaaggagttcttcccgcagcatccgaacttttgtgagccccaggactaccgacccatgaaccatgcagctttccgggatgagctgaggaacttccgcctcaagacacgcagctgggctggggaacggagtaccacccaactctgtagcaggctgcaagaccagtgacgagccagcctcagtcctgccaccatccttacctcaggaggcttgcgagccagtgggtcccatgggcctatgcggccacctacttgctagaggcctcaggtgctatagggggttggggggatggtgtggtgtcacatctgtctgtccctgtcctcaattttcctgtctcactccactaattttctgtatcttggatctgatcccatcttaaagagctgaaccaatgggtgaataccagctaagaggaagtcctttgtgttcaatgagagcccttttacaatctcctttttccttgtttgtgttgactccttgtcttaccccttcgcagggagagcctcagccctttaagatgagcacagtagcttcttgggtagcctggattgcaggacgctacactgctgcacagggctgtgtctgctctcctctcctggcctctgcacagattcctccattggaagcataagtgcttagtttcctgttgtcgtcttacccatagctttcattttcgtctgtctcacttagcgtgtcccaggacacactgacagctggggaggctcccttgtacagctggggactagagattcaaatatcatgtactcattaggcttggcttttgttagcccacaaagggatcttttcctttaagacccccagagctagagcaaaggcctgattcaggagcctctgggagccccatcctcactgctgtgaaccctagagcctcactggtcagcacttgttgctgggcaatgaaccagtcactgagcttcactttttggtccttctctgtccctccctgtccctctctgtccttctttccatatctggtcctgagta

SEQ ID NO: 3952 - DNA, 2436 bp, Rattus norvegicus
  Genbank Accession No. NM_133578
agctttccggggcagcgagtggcggggccgggtgctgagcgagcggggcgtggagagcgtcgcgcggcccctcgcgccgggctccgtttgcaggccacagcccccgcgaggtggcccgccggccctgggccgcccgtcctctggcagctgtggtgagcgcagcgtcgggccggcatgaaggtcacgtcgctcgacgggcgccggctgcgcaagatgctccgcaaggaggcggaggcgcgctgcgtggtgctcgattgccggccctacctggccttcgccgcgtcgagcgtgcgcggctcgctcaacgtcaacctcaactccgtggtgctgcggcgggcccggggcggcgcggtgtctgcgcgctacgtgctggccgacgaggcagcccgcgctcggctgctgcaggagggcggcggcggcgtggcggcggtggtcgtgctggaccagggcagccgccactggcagaagctgcgggaggagagtgccgcgcgcgtcgtcctcacctcgctgctggcctgtctgtccgccggaccgcgggtctacttccttaaaggtgggtacgagaccttctactcacagtatcctgagtgctgtgtggatgcgaagcccatttcacaagagaagctcgaaggtgaaagaggcctcctcagccagtgcggaaagcccattctcagcgtcgcctacagaccagcttatgaccagggtggcccagttgaaatccttcccttcctctaccttggaagtgcctaccatgcatccaagtgcgagttcctcgccaacctgcacatcacagccctgctgaatgtttcccgccggacctctgaggcctgcacaacccacctacactacaagtggatccctgtggaggacagccacaccgccgacattagctcccactttcaagaagcaatagattttattgactgtgtcagggaagagggaggcaaggtcctggttcactgtgaagccggggtctcccggtcgcccaccatctgcatggcttacctcatgaagaccaagcagttccgcctgaaggaggccttcgagtatatcaagcagaggaggagcgtggtctctcccaactttggcttcatgggacagctcctgcagtatgagtctgagatcctgccctccacacccaccccccaacctccctcctgccaaggggaggcagccagctccacctttataggccacttacagacactgagccctgatatgcagggtgcctactgcacattccctacctcagtgctggcaccggtgcccacccacgccaccgtcgcagagctccacaggagccccgtggccacagccacatcctgctgagaccggtcggctaccagcgcatccccaagagcaactgtgacctttggattttttaaacttgtggacatttcatacccgtgcaatactgaagacctctctctgtcccgctgccccggtgagatggtgaggggtcagcaggcttgcagatgcacttcaggctaacccggaggatggtttctcgcgattgtaggaaggccaagccatgcccccctagcacagcggcgtgctaactactgtacttccagaagccccgcccactcaggaccgcctcatccttgcacctcagaagtcccggcttctcatttcaagtgtaaggcaatacacagtcgcagcaaagtaggagcaagctgtgctggaccaggaggggaggagtccgcccgtctgggaggaagcacaagtttcactgttaatttgaatttcggccaactttgtctgtctctgtcctctgtcacttcagggaagagagctggtcaccgctcagtcagaaaagttaaccccgctggatttgtcaagacaaaaggacctgcccgtctgaacccagtgtttctgaggttctgtctaggatcccatggaagctgttggtgtaaggagaagctcctgactcattggagtttcttgctcaccgagggctccttggtgaccttggactttggcatggtttttacaaatacttgaacctgtcccattgtatctctccctaaagcacctctggtgtcattcagaaagttgtcagaccctagaccaaaaaccacccctttgagggggtagcaggaactgcctgcgttctgggtcagtggtggtgactgacatactttttcagtttagtgtcctgtgtgctttttttgtcatccattgtgacaatgtttccctccctaccctggggagtcgttttcaaactactgattctggggtctgcatcgtttgcaatgtggtactactatgtccttcgtagattgtttttccaaggggggaaaggcaataagtcacccccaaacccatgtgaatgtgaagaaaagcagtgttgatgttttttttatatatatatatatacatgtagtacaaaattaaaaaaatgtcaaaaaataaaaataaaaagtgctaagtgaa

SEQ ID NO: 3953 - DNA, 1998 bp, Rattus norvegicus
  Genbank Accession No. NM_133583
acgcggggccccaaccccctgcttgttgtccaacttctcacggagcagcgggagagcaagcggcaggactcggctgaggaggccaccatggcagagcttcaggaggtgcagatcactgaggagaagccactgttgccaggacagacgcctgaggctgccaagactcattctgtggagacaccttatggctccgtcacttttaccgtgtatggcacccccaaacccaaacgtccagcgatattcacctaccatgatgtaggactcaactataaatcttgcttccagccactgtttcagttcggggatatgcaagagatcatacagaacttcgtgcgggtccatgtggatgcccctggaatggaagagggggcacctgtgtttcctctggggtaccagtacccatctcaggaccagcttgcagacatgattccttgcatcctgcagtacttaaatttctctacgataattggagttggcgttggagctggagcatacattctgtcacgatacgctctgaaccacccggacaccgttgaaggtcttgttctcatcaacattgatcccaacgccaagggctggatggattgggcagcccacaagttaaccggccttacgtcttccattccggagatgattcttgggcaccttttcagccaggaagagctttctggaaattctgaattgatacagaagtatagaagtctcatcacacacgcgcccaacctggagaacatcgaactgtattggaacagttacaacaaccgccgagacctgaactttgagcgaggtggtgagatgaccctcaagtgccccgtgatgctggtggtaggagaccaagcacctcatgaagatgccgtggtggaatgtaattcaaaactggaccccacacagacctcattcctcaagatggcggactctggaggtcagccgcagctgactcagccaggcaagctgacagaagctttcaagtacttcgtgcaaggcatgggctacatggcctcatcctgtatgactcgcctgtctcggtctcgcacagcatctctgaccagtgcggcatccatcgatggcagtcggtcccgatcccgcaccctgtcgcagagtagcgagtctgggactctcccttctggacccccggggcacaccatggaagtctcctgttgagcgaccctctttgccttggtgtggaacccagccctcacctcccgcagcactaacttaagaggtgttttcagggcaatgggccagagtcagcaaggaaaatgggcagattgtgcagggagatgatgaccttgatctttaattgctaccctaaccttgacctttaacctgtgatatcctctagctcctcggtgaggtgtcctaatatctcttagagatccaggccccctaagtcatctcctcctcccgttttggtcttgagaaggcttttatgttccctctctgacctgggttctatagatgaggaacaataagttgttttagctgtcacggggatgccatcactccccctctttagcccatatttgcaagggtaggagagtgtgtgtatgtgtagggttggtggtgggatatgaggagctccattcccccaaagctgaaacagtgccttgacgtttaaggcctctgaaggcaatgctcctaaatggatgtctctcaggggaatatttgctggtgtgttactgatccttaacgtgatagacatatccagcatgtaaaaagaaagtcagaacgggagatggtggccagtgaagaacaatggtaaacacattgaagcaggggcattagggaggggcccgggtcctttggccgcactaactttaatagctgtcagtgtgcacctaaagtgggactgggggaaagaacttaggtccgactgcttggggtttggcatcagggtgggaagggctacctcagactctgaccatactcttgtgtgtagggtgtgacctcctgtctcacacaacttctgctgtgacaataaaagatagaggaaactga

SEQ ID NO: 3954 - DNA, 1902 bp, Rattus norvegicus
  Genbank Accession No. NM_133586
tagcccgacgaactgagaactggccatggcacggaaacaaccacatagctggctgaatgctgtgctctttgggctcctgcttattcttatccatgtgtggggtcaggactcaccagagtccagctccatcaggaccacacacacgggccaggtccgaggaaagcttgaccacgtgagggacactaaagctggtgtccacaccttcctgggaattccctttgccaaggctcctgtaggaccgctgcgctttgcacctcctgaggaccctgagccatggagtggtgtgagagatgggacctcacatccggccatgtgtctgcaaaatattgatatgctggatgaagtaggcctgacagatatgaaaatgatactgtcttccattcctatgtctgaggactgcctgtatctcaacatctatacaccagcccatgcccatgagggctctaacctgcctgtgatggtgtgcatccacggaggtgcactggttataggaatggcttccatgtgtgatggatctctattggcagtcaatgaggacttggtggttgtcgctatccagtatcgtctgggtgtcctgggctttttcagcactggagatgagcatgccagaggcaactggggatacctggaccaagtggctgccctgcgatgggtccagcagaatatcgcccattttggaggcaaccctaaccgggtcactatttttggcgtgtctgcaggtggcacaagtgtgtcttcacatgttatatcccccatgtctcaagggctcttccatggtgccatcatggagagtggagtggccctgctgcctgaccttatctctgaaacctctgagacggtctccactacagtggccaagctctctggatgtgaggccacggactcagagaccctggtgcgctgcctgagagccaagagtggagcagagattctggtcattaacaaggtcttcaagatgattcccgctgtggtggatggagagttcctacccaggcatcccaaagagctgttggcatctgaggattttcgccctgtccccagcatcattggtgttaacactgatgagtactgttgcaccattcctatggtcatgggcactgctcaaataataaaggagctatccagagagaacctgcaggctgttctaaaggatacagcagcacaaatgatgcttcctcctgagtgtggtgacctgctaatggaagagtacatggggaatactgatgatccccagaccctacaaatacagtacgctgagatgatgggagacttcctgtttgtgatccctgcactccaagttgcacactttcaacgttcccatgcccctgtctacttctatgagttccaacatgcacccagctatttcaagaatgtcaggccaccccacgtgaaggctgaccatgctgatgaggttccttttgtctttgggtccttcttctggggcataaaagttgacttcactgaggaggagaagctgctgagtaggcggatgatgaagtactgggccaattttgcaagacacgggaaccccaacagcgagggtctaccctactggcctgtgttggaccacgacgagcagtacctgcagttggacacccagcctgctgtggaccgagccctgaaggccagaaggctgcagttctggaccaagactctgccccagaagatccaggagctaaatggagctcagaaaaaccatgcagagctgtagtgtctggtgaaaggaacagagtgtgggagtgagggcaggtgggatcattctgagtttcaaagtctaattttctgttccaacacgcagaatcctttccaaccccaatattttccctttctgacatgaatgagaagccctccgtgtgttactctttattcttctgggcaaaatttaattggactcaataaaga

SEQ ID NO: 3955 - DNA, 1270 bp, Rattus norvegicus
  Genbank Accession No. NM_133589
  misc_feature (1)..(1270): n = a or c or g or t
cgccgctgcctccgctactaccaccggccgccgctgctgttgccgcggcttgttcttcctaaaatggcgccactggatctggacaagtatgtggagatagcgcggcagtgcaagtaccttcccgaaaacgacctgaagcggctatgtgactatgtttgtgatctgctcttggaagagtcgaatgttcagcctgtatcaacgccagtaacagtgtgcggggacatacatggacagttttatgatctttgcgaactgttcagaactggaggtcaggtccttgacacaaactacatatttatgggtgattttgtagacagaggtcactatannnnggtgaccttcacttatcttcttgcactaaaggctaagtggcctgaccgtattacacttttaagaggaaatcatgagagtagacagataacgcaggtgtacggattttatgatgagtgccaaaccaaatatggaaatgctaatgcctggagatactgtaccaaagtttttgacatgctcacagtagcagctttaatagatgagcagattttgtgtgttcatggtggtttatctcctgatatcaaaacactggatcaaattcgaactattgagcgaaatcaggaaattcctcacaaaggagcattttgtgacctggtatggtcagatcctgaagatgtggacacttgggcaatcagtcccagaggagcaggttggctttttggagcaaaagtcacaaatgagtttgttcatatcaacaacttaaaactcatctgcagagcacatcagcttgtgcacgaaggctataagtttatgtttgacgagaagctggtcacagtgtggtctgctcctaactactgctatcgctgtggaaacattgcttccatcatggtcttcaaagacgtcaacacgagagaaccaaagttaaaccgagcagttccagattcagaacgtgttattcctcccagaaccacgacgccgtatttcctttgaggcctttgccatcccgctggccactttttgccctcttttacccmamyttcttgtaccctctacaatatactttttattgagcactttgctgctgaaatgctgcctcttgccttttttttaattttaaattatctaactttattgtttgttatggtgtcaatagcagtgtttttctatcagttttgtcactcatcctatccccacatggactcgtttgagaagacttgagaaatgtcttaatactcacattgctgcatgtagctcttgcttgtttgctgttctggggaga

SEQ ID NO: 3956 - DNA, 676 bp, Rattus norvegicus
  Genbank Accession No. NM_133595
ggcgccgcccgcggacagagcagggagtaacggggactgtggtcgcgggcagccccagccactcaccatgccctacctgctcatcagcactcagatccgtatggaagtgggtcccaccatggtgggtgatgagcactcggatccagagctgatgcagcagttgggggcctccaagagacgagtcctgggaaacaacttttatgaatactacgtcaatgaccctcctcgaatagtcctggacaagctggaatgcaggggcttccgagtgttaagcatgacaggggtgggccagacgctggtgtggtgtctgcacaaggaatgacctgcttgagctgacttgtgcgtagggtatatattctttggagggatcgccatgtgccctgtccataatcttgcatcactgtctcccctgtcgctctctttccaaattgtcaacttccttgcccaacactgatgggctgtgaacagcctcaggaaccttgctgcggttggttgggtacagcaggccctgccccggctccttcagcttcccccagctggacctggacctgcctcttgctgtaggccatgtgcagaaggcaagctaccctgaggatggtccctggatcctacacagctaatccaagccaataaagggctctcacaagtgttgttcctcaaaaaaaaaaaaaaaaaa

SEQ ID NO: 3957 - DNA, 624 bp, Rattus norvegicus
  Genbank Accession No. NM_133599
aattcaagcggagagctgtgtccaggagccgtcaccatgtcggagaaattcgaggtcacaaacctgaacatgaaatcagggatgtccctgaagattaaaggcaagatccacaatgatgttaacagcttcaccattaacctgggccaggggaaagaaacgctgaacctgcattttaaccctcgcttcaatgaatccaccattgtctgtaacacccttgacggtagcagctggggacaagagcaacgagaaaaccattcctgtttcagtccagggtcagaggtcaagctcacccttaccttccaagacaaagacttcaaggtgacgctgcctgatggacactcgctgaccttccccaacaggctgggccacaaccacctgcgctacttaagcatggatgggctccagatctcctccttcaagctcgagtgagcatctcctcagaagaccttagccccaaaccagcttcagccagccctccagcaagcccccaccagaaccgcagtctttataggttctgctcttactcaccgttcactctgaactcctgccctaactaattaaccccttccccaagttcaaggccaaataaaagaatccatttttattatttccacagcaaaaaaa

SEQ ID NO: 3958 - DNA, 3097 bp, Rattus norvegicus
  Genbank Accession No. NM_133606
ggtgcaggataccttgagaaaatggctgagtatctgaggctgccccactccctggcgatgatccgcctctgcaacccgccagtcaacgccgtcagtccaactgtaatcagggaagtaagaaatggactccagaaagctggatcagaccacacggttaaagccattgtgatctgtggcgcaaacggaaacttctgtgcaggtgctgatatccatggctttagtgcttttacccctggccttgcattaggaagcttggtagatgaaatacagagataccagaagccggtgttggccgctatccaaggtgtggctctcggaggaggactggagctggccttgggctgtcactatcggattgccaatgcaaaggctcgtgtcggcttgccagaagtcacactggggattcttcctggtgcaagaggaacccagcttctccccagggtcgttggagttcctgttgctcttgacctaattacctcaggaaaatatctttcagcagatgaagcactcaggcttggaattctggatgcagtcgtgaagtcagacccagttgaagaagccatcaaatttgctcagaagattatagataaacccatagaaccccgcaggatctttaacaagccagttccaagcttgcccaacatggacagtgtttttgcagaagccatcgccaaggtacgaaaacagtaccctggtgtcctggctccggagacgtgtgtccgctcaatccaggcctctgtgaagcatccctacgaagtaggcatcaaggaagaggaaaagctgtttatgtacctccgggcatccgggcaggctaaagccctacagtatgccttctttgctgaaaagtctgcaaataagtggtcaactccctcaggagcgtcttggaaaacagcctctgctcaacccgtctcctcagttggcgttcttggcttgggaacgatgggccgaggcatcgccatttcttttgcgagagtggggatctctgtggttgctgtggagtcagacccaaagcagctagatgctgcaaagaagataatcactttcaccttggagaaggaagcatccagagcgcatcagaacggccaagcttcggcaaaaccaaaactcaggttctcctcatccacaaaggaactttcaactgtggatttggtggttgaagcagtgttcgaagacatgaacctgaagaaaaaggtctttgctgagctgtcagccctgtgcaagccaggagcctttctgtgcaccaatacctcggcgctgaacgtggacgacattgcttcttccacagatcgccctcagctggtgattggcacccacttcttctcaccagcccatgtcatgaggttgctagaggtcattcctagccgatactcttcccctactaccatcgccacggttatgagcttgtccaaaaagatcggaaagattggagtagtggttggcaactgctatggatttgttgggaatcggatgttggctccctattacaaccaggggtttttcttgttagaggaaggtagcaagccagaggatgtagacggggtcttggaagagtttggttttaaaatgggacccttcagagtgtcagacctcgcagggctagatgtgggttggaaaattcgcaaggggcaaggccttactggaccatcattgccaccagggacccccgtccgaaagaggggcaacagcaggtactccccacttggcgatatgctctgtgaagctgggcggtttggtcagaagacaggtaaaggctggtatcagtatgacaagccactgggtcgcatccacaaacctgatccctggctttctacgttcctgtcacaatatagagaggttcaccacatcgagcagcgcaccatcagcaaggaggagatcctggagcgttgcttatattccctcatcaatgaggcgttccgcatcttggaggaggggatggctgctcgcccagagcacattgatgtcatctacttgcacgggtacgggtggccaaggcacaagggcgggcccatgttctatgctgcctcagttgggttgcccacagttctagagaaactgcagaaatattacaggcagaaccctgacatcccccagctggagcccagtgactacctcagaaggctggtagcccagggaagccctcctctgaaggaatggcaaagcttggcagggccccacggcagcaaactgtgattcagccttctgcgttttgccacgtatgttggcacctaatttcagtatgattccttcctaaaatccaaacagatcgctctgaagtacaaatcatgattgctgctgctgctgctgctgatagctggtcagtaaaagctcctctccgtatctttctacctcataattccaatggtcagacttcaggaatgtctacagttagtctatacctctgactgcacttctatcggaaaaattcaacgaatgtatgtttactactacaagcattcttctcttttgactgtttgcccactctaacaaaaacgtatacaaaatgttgctaatagaataattcacacctccagttgacaacccaaatggccttagcagatcaacacaggtggcatatacacgcacttgacacattccagctgtgtgaagttactgccacctgttgtaacatggtgctgggttagagcactgttctgagtgaggggaggcaggcagagaaggcaggcagataaggccacacatcatatggatgtggatataaaattccaggatatgcaggtctgtggacaacatagatgagtagcccaaggctgtaactgttcatacatgcatatattttttggtccttttttttttcggagctggggaccgaacccagggccttgcgcttcctaggtaagcgctctaaccactgagctaaatccccagccccgaggctgtaactgttagaggttaaaaatcactactgattagtacagagtatctttgggagctgataaaattttctaaaattactctagtggtggatctgtaacacattgagttcaatggttcaaagtgaattatattttatatatatatatatatatatatatatatacatatatatatagtctatctcaataaagttaataaaatt

SEQ ID NO: 3959 - DNA, 1956 bp, Rattus norvegicus
  Genbank Accession No. NM_134326
atgaagtgggtaacctttctcctcctcctcttcatctccggttctgccttttctaggggtgtgtttcgccgagaagcacacaagagtgagatcgcccatcggtttaaggacttaggagaacagcatttcaaaggcctagtcctgattgccttttcccagtatctccagaaatgcccatatgaagagcatatcaaattggtgcaggaagtaacagactttgcaaaaacatgtgtcgctgatgagaatgccgaaaactgtgacaagtccattcacactctcttcggagacaagttatgcgccattccaaagcttcgtgacaactacggtgaactggctgactgctgtgcaaaacaagagcccgaaagaaacgagtgtttcctgcagcacaaggatgacaaccccaacctgccacccttccagaggccggaggctgaggccatgtgcacctccttccaggagaaccctaccagctttctgggacactatttgcatgaagttgccaggagacatccttatttctatgccccagaactcctttactatgctgagaaatacaatgaggttctgacccagtgctgcacagagtctgacaaagcagcctgcctgacaccgaagcttgatgccgtgaaagagaaagcactggtcgcagctgtccgtcagaggatgaagtgctccagtatgcagagatttggagagagagccttcaaagcctgggcagtagctcgtatgagccagagattccccaatgctgagttcgcagaaatcaccaaattggcaacagacgttaccaaaatcaacaaggagtgctgtcacggcgacctgttggaatgcgcggatgacagggcagaacttgccaagtacatgtgtgagaaccaggccactatctccagcaaactgcaggcttgctgtgataagccagtgctgcagaaatcccagtgtctcgctgagacagaacatgacaacattcctgccgatctgccctcaatagctgctgactttgttgaggataaggaagtgtgtaagaactatgctgaggccaaggatgtcttcctgggcacgtttttgtatgaatattcaagaaggcaccccgattactccgtgtccctgctgctgagacttgctaagaaatatgaagccacactggagaagtgctgtgctgaaggcgatcctcctgcctgctacggcacagtgcttgcagaatttcagcctcttgtagaagaacctaagaacttggtcaaaactaactgtgagctttacgagaagcttggagagtatggattccaaaacgccgttctggttcgatacacccagaaagcacctcaggtgtcgaccccaactctcgtggaggcagcaagaaacctgggaagagtgggcaccaagtgttgtacccttcctgaagctcagagactgccctgtgtggaagactatctgtctgccatcctgaaccgtctgtgtgtgctgcatgagaagaccccagtgagcgagaaggtcaccaagtgctgtagtgggtccttggtggaaagacggccatgtttctctgctctgacagttgacgagacatatgtccccaaagagtttaaagctgagaccttcaccttccactctgatatctgcacactcccagacaaggagaagcagataaagaagcaaacggctctcgctgagctggtgaaacacaagcccaaggccacagaagatcagctgaagacggtgatgggtgacttcgcacaattcgtggacaagtgttgcaaggctgccgacaaggataactgcttcgccactgaggggccaaaccttgttgctagaagcaaagaagccttagcctaaacacatcacaaccatctcaggctaccctgagaaaaaaagacatgaagactcaggactcatctcttctgttggtgtaaaaccaacaccctaaggaacacaaatttctttgaacatttgacttcttttctc

SEQ ID NO: 3960 - DNA, 2048 bp, Rattus norvegicus
  Genbank Accession No. NM_134329
ccgtgcgtcagtcagaacacgttcctgtttgcagaccacaaacccaggaaagccaggatggacactgctggaaaagttattaagtgcaaagcagctgtcctatgggggacgaaccagcccttctccattgaggacattgaagtggccccaccaaaggctaaggaagttcgtgttaagattttggccacgggaatctgtggcacagatgaccacgtgatcaagggaacgatggtgtctaagttcccagtgattgtgggacacgaagcagttgggattgtggagagtgttggagaagaggtcactacagtgagaccaggtgacaaagtgatccccctctttctaccacagtgtagagaatgcaacccctgccgcaacccggaggaaaatctctgcattaggagcgacctgacaggccgtggagtattggctgacggcacgaccaggttcacatgcaagggcaaaccagtccagcactttatgaacaccagcaccttcactgagtacacggtcctggatgaatcctccgtagctaagattgatgccgaggctcctcccgagaaagcctgcttgattggctgtggattttccactggttatggggctgctgttaaaactgccaaggtcagccctggctccacctgtgctgtgtttggcctgggaggagttggcctgtcagtcgtcatgggctgtaaagcggccggcgcctcccggatcatcggaattgacatcaacaaggacaaatttcagaaagccctggatgtaggggccacagagtgtatcaatcccagggacttcaccaagcccatcagtgaggtgctgtcagacatgacaggcaacactgtccagtatacttttgaagttatcgggcgccttgagaccatggttgatgccctctcatcttgccatatgaactatgggaccagcgtggtggtcggggctcctccgtcagccaagatgctcagctatgacccaatgctgcttttcactggacggacatggaagggctgcgtctttggtggttggaagagcagagatgatgttcccaaattggtgactgaattcctggaaaagaaatttgacctgggccagttgataacccacaccttgccttttcataacatcagtgaaggatttgaattgctttattcagggcaaagcattcggactgtcctgacattttgagatccagagagctgggtgttctgtgctgggcgaccgtgacctgaagccttgttcctgacagtgttctctgatatcacgagtctgtctcagaaatgccatgcagaggccaggttggggacaagagagagaagctctacagaggtttataaaccttcatatgtttagtttaccgggtgcctagcattagcagagaacagtaagagtaaatgttctagtctgcgttttcctaagacgataattctacacttcataagcatatacttggggttccaatttgttggaagagggactgttttccagaattttaccacaagttgttgttacttaaaaacagacaaagcatgtcgagagatgtagagaatacatttttcaagagatccccaccaaagccacccgagctctcattctgtttttcaacagaaacacttttaaaaatgttataaattaacttgaattagattgtgaaattgcacacataacttgattagattaagaaagaaagttgggaaatttaagggaagggcacgttttttaatgattaactttgaaaattatcgttatgtaatttagtgacatgggggaagcacatctgtgcctggggatatcgtcagcgtttattaatataaagcacttttacagtagcgattacagatgaaccatagatataaccacattgggatatttatgatattaaggttaataaagtagaatgacaagtccttaagggcatagtagtaactccatttaacatgaagattattctcagattgctttaactacaccagcctgtatctgcatctgtctgtggacatgtacacacacgtaatattcattaaattttcattgtggtaaaagaaaaaaaaaaa

SEQ ID NO: 3961 - DNA, 1874 bp, Rattus norvegicus
  Genbank Accession No. NM_134346
gccggccgccccgaagactgccggcgacggcgacggggtactgacagcgcgagaggtactaagtgtaacaagtgtgcatcatgcgtgaatataagctagtcgttcttggctcaggaggtgttgggaagtcggctctgactgtacagtttgttcaaggaatttttgttgaaaaatatgatcctacgatagaagattcttatagaaagcaagttgaagtagatgcacagcagtgtatgcttgaaatcctggatgctgcaggaacggagcagtttacagccatgagagatctgtacatgaagaacgaacaaggctttgcgttggtttactccatcacaacgcaaatcgactgtaatgacttacaaggtctgagagagcagattcttcgggttaaagacactgacgatgtcccaatgattctggttggtaacaaatgcgacctggaagacgaaagagttgtccccaaggaacaaggtcagaacctggcaagacagtggagcaactgcgctttcttagagtcctccgccaagtccaagataaatgttaacgagatcttttatgacctagtgcggcaaattaacagaaaaaccccagtgcctgggaaccgtcgcaaaaagtcaccatgtcagctgctttaatgtactgaatgcattgtagctctgagccaggtctgaagaactgttgcccaattcagcagtgccagcattccaactttgttaaacctaccaacatcttaaatggactttcccgtggtggtaccctgtaagaggcggacgaaagctactctatcagtttgcacattctaatcactttccagtatcacgagaggtttgacttatatgatagttctagagtatcgagctggtaaaaccagaggctacatccagtattactgctaagagacattcttcatccaccaatgttgtacatgtatgaaaatggtgtactgtatactttaacacacccatactttgtattggagagtacaataatgtaaatcctaaaagcaccactattttagcataataaaagaaagtccaaagagctcctatatagactactccagataactttgcttctttgatacttgtagcttactgtaattttttttaaattcaaggtcattatcattgtattatacaaaataagcgctttgattaacacagctatatagtttttttaatttttcaaaaacctgtggagacagtgatcttgtctttaaaatatgatagtcctttcagtataatgtcttagattaaagacgttgcctttaatatctgttgggaaggaaatgtccagactttcaaatctccttattattatgtttccttttatcgtttacatagggaacaatgtttatagttgtgtgtacagtgggggtctacaacaagaagtgtatattttcaaacagttttttaatgatttaacaactttgtaaatcattttcaggcttctgcagctgtagattctcactgtgcctcccttgcttgctcgtgcacacgtgtgtctgcaataccaaatacacaggtttagtatcttcgcctgttagtgactgtttccatgtgtaacgttttggttgagatgttaaatggtgacgagtactgtgatgtgaatgtggttgtaatttaatcatgtgtaattggtcacaaggctaatctgcagtaactcttgctgttctatttaacaatgccttgttgccgtttgtatcgattaacgtttgggtgtaaacattgtgtgtccatccaacagggagccacagtatttaaattgaccaacctgatgttgaggtggccaaatgtaaactaaaagccttaattaaagaggagcaattttgtataacttagcatccgtgttcaataaatttggattgccgtgca

SEQ ID NO: 3962 - DNA, 883 bp, Rattus norvegicus
  Genbank Accession No. NM_134349
gctagctgtcctcctgggattcagtcatttaaagattgagaccaagattgaaagcatggctgacctcaagcagctcatggacaacgaggtgttgatggcctttacctcctatgcaacgatcattcttgccaagatgatgttcctgagctccgcgactgcattccagaggctaaccaacaaggtttttgccaacccggaagactgtgctggcttcggcaagggggagaatgccaagaagttccttcggactgacgagaaggtggaacgcgtgcgaagagcccacctgaatgaccttgaaaacatcgttccctttctcggtatcggcctcctgtactccctgagcggaccggatctctctacagccctcattcacttcagaatctttgtgggcgctcggatctaccacaccattgcttacttgactccccttcctcagccaaacaggggcttggcattttttgttggctacggagttactttgtcaatggcttacaggctgctcaggagcagactgtacttgtaaagagatttgtgaccgtcaccctctgattgatttaaaaaaataaaggattctatatttctagtgtattaaaaaactttctaaggttttatgtatgaaaggagcagagaaatcaggaatcagggaaaattctgtttgaagactaccatccacaggctctacccttttgtacctgggttagacatttaacatgaccggccttagctatgctgtctaactcctaaagtactttgtcctaagtcttgagtgccttataaattgtaacattccttctacatttcctgtggtgcatctataaaagagtgctcacacctgtgtgaagcctgggtttcattggcacctgaattaaaaacattacaaatg

SEQ ID NO: 3963 - DNA, 1337 bp, Rattus norvegicus
  Genbank Accession No. NM_134351
gcatctgcgccctccgcagtcctctgcctcgttgccgctccgtctccccagagtcgccttctctcatcgctgcagccatgaacgggcagctcaacggcttccatgaggcgttcatcgaggaggggacattccttttcacttcagagtctgtaggggaaggtcatccagataagatttgtgaccaaatcaatgatgctgtccttgatgcacaccttcagcaggaccctgatgctaaagtggcttgtgaaactgttgctaaaactggaatgatccttcttgctggggaaattacatctagagctgccattgattaccagaaagtggttcgtgaagccataaagcacattggctatgatgattcttccaaagggtttgactacaagacttgtaatgtgttggttgccttggaacaacagtcaccagatatcgcccaaggtgttcatcttgaccggaatgaggaagacattggtgcaggagatcagggtttgatgtttggttatgccactgatgaaactgaagagtgtatgcctttaactattgtcttagcacacaagctaaatgctaaactggctgagctacgccgcaatggcacattgccttggttacgcccagattctaaaactcaagtgactgtgcagtatatgcaagatcgaggtgctgtgattcccatcagagtccatacaattgttatatctgttcagcatgatgaagaagtttgtcttgatgaaatgagggatgctctgaaggagaaattgatcaaagctgttgtacctgcaaagtaccttgatgaggatacaatttaccacctacagccaagtggcagattcgttattggtgggcctcagggtgatgctggtttgactggccgaaaaatcattgtggatacttatggcggttggggagctcatggaggaggggccttttcaggaaaggattataccaaagtggaccgttcagctgcttatgctgctcgttgggtggcaaaatcccttgttaaaggaggtctgtgcaggagggttcttgttcaggtctcttatgctattggagtttctcatccattgtcgatctccattttccattatggtacttctcagaagagtgagagagagctattagaaattgtgaagaataattttgatcttcgccctggggtcattgtcagggatctggatctgaagaagccaatttatcagaggactgcagcctatggccactttggtagggacagcttcccctgggaagtgcccaaaaagcttaaatattgaaagtgttagccttttttccccagacttgttggcgtaggttacagagaagccttcaagctctgagggaaaggg

SEQ ID NO: 3964 - DNA, 4198 bp, Rattus norvegicus
  Genbank Accession No. NM_134406
gacgcgctgagccgctgccgccgcgggggggaagcctgcgagtagctcgcgtgcccgcagtccgcgtaagccccgcgccccttccacccctggccaggccatggcggaacgtggaggggcgggcggtggtcccggaggcgccgggggcggcagcagtcagcggggctctggggttgcccagtccccgcagcagcagccgccgcagcagccatctcagccgcaacagccaacgccccccaaactggcccaggccacctcgtcctcctcgtccacctcggctgcggccgcctcctcctcgtcctcctccacctccacctccatggccgtcgcggtggcctcgggctctgcgcctcccggcggtccgggaccaggccgcacccccgccccagtgcagatgaatttgtatgctacctgggaggtggaccggagctcatccagctgcgtgcccagactcttcagtttgactctgaagaaacttgttatgcttaaagaaatggacaaagatcttaactcagtagtcattgctgtgaagctgcagggttcaaaaaggattcttcgctctaatgagatcatccttccagccagtggcctggtggaaacagagctccagttaaccttctccctccagtaccctcatttccttaagcgagatgccaacaaactgcagattatgttgcaaaggaggaagcggtacaagaaccggactatcttgggctataaaaccttggctgtgggactcatcaacatggcagaggtgatgcaacaccctaacgagggtgctttagtacttggcctgcatagcaacgtaaaggatgtctctgtgcctgtggcagaaataaaaatctactctttatccagccagcccattgaccatgaaggaatcaagtctaagctgtctgatcgctccccagatattgacaactactctgaagaagaggaggaaagcttctcctcagagcaggaaggcagtgatgacccattacatggacaggacctattctatgaagatgaagatcttcggaaagtaaagaagactcgaaggaaactgacctcaacctcagccatcactaggcaaccgaacatcaaacagaagtttgtggccctcctgaaacgattcaaagtttctgatgaggtgggctttgggctagaacatgtgtcaagggagcagattcgggaagtggaagaggacctggatgaactatacgacagtctagaaatgtacaaccccagcgacagtggccctgagatggaagaaacagaaagcatcctcagcaccccaaagcccaagctcaagcccttctttgaggggatgtctcagtccagctcacagacggagatcggcagtctcaacagcaagggcagccttggaaaagacaccaccagccctatggaattggcagctttagaaaaagttaagtctacttggattaaaaaccaagatgacagcttgactgaaacagacactttagaaatcactgaccaggacatgtttggagatgcgagcacaagtctggttgtaccagaaaaagtcaaaactcctatgaagtccagcaaagctgatctgcagggctccgcctcgccgagcaaggtggaagggacacacacacctcgccaaaagaggagcactcccctgaaggagcggcagctctccaagcccctgagtgagaggaccaacagctctgacagtgagcgctctcctgacctagggcacagcacacagattccacgaaaggtggtatacgatcaactgaatcagatcctggtttccgatgcagcgctccctgagaatgtcatcctggtgaacaccacggactggcagggccagtatgtggccgaattgcttcaagaccagaggaagcctgttgtgtgtacctgctcaacagtggaggtccaggccgtgttgtctgccctgctcactaggattcagcgctactgcaactgcaactcatctatgccgaggccagtcaaggtggcagctgtgggcagccagagttacctgagctccatccttcggttttttgtcaagtcccttgccagcaagaccccggactggctgggccacatgcgcttcctcatcgttcccctaggttctcatccagtggccaaatacttgggctcagtagatagtagatatagcagcacctttcttgattctgcttggagagacctgttcagtcgctcagagcctccagtgtcagagccactggatgtggtgggtcgtgtgatgcagtatgtcaatggagctaccacaacgcaccagctgcctgtggctgaagccatgttgacctgcaggcataagttccctgatgaagactcctaccagaagtttatccccttcattggtgttgtgaaagtgggccttgttgaagactcgccctccactgcaggtgatggggacgattcacctgtggtcagccttactgtgccctccacatcaccaccctcaagctcgggcctgagccgagatgccacagctacccctccctcatccccatccatgagcagtgccctcgccatcgtggggagcccaaatagcccttatggggatgtgattggcctccaggtggattactggctgggccaccctggggagcgaaggagagaaggtgataagagggacgccagttcaaagaataccctcaagagtgtcttccgctcagtgcaggtttctcgcctgccccatgcaggggaagcccagctttctggcaccatggcaatgactgtggtcaccaaagagaagaacaagaaagtgcccactatcttcctgagcaagaagccccgggaaaaggaggtggattctaagagccaagtcatcgagggcatcagccgcctcatctgttctgcaaagcagcagcaaaccatgctgagagtgtccattgatggagttgaatggagtgacatcaagttcttccagctggcagctcagtggcccactcatgtcaagcacttcccagtgggactcttcagtggcagcaaacccacctgagacctgcctcccaaccactccctcctggcactgccacccagcccagcctcctttcctagcactggggcttgcctccacttgcccagtcctgaaggacactgccactggggatgcagtcctccctgctcactgcccagccatctctgcccagctcccccctgttccaggcccagagctgggtgatcctgccttctggtgcccataattcctgtaattgaataatctgggccttccttcacctcacccctgcagcgctggtaccctttctagaaatgaaacacctggagttctggtacacagggagacagcccagcatcctacataagctggccacccagctctgcatttctaaggctctgttgcctgttgtactcaccctgccttcctccagcagggctggggcctcctgccattcctcacctgcctcacagtttcccagtagggggaaggaggatggcacctgggcatcctggagtttctgggattgaagggaccttcccagtctcccatgcatgatttcctgacacttcaagtcgcttggatgtcctgtgttttgtgtgtttttagttgtttgggtaacttgtcctgtgcacaggtccttaaggctccttctccctctgcctcccagcctcctacctaacattgctctgtggcttcatgaggtaggagacagcaaacccacccacccacccaccccttcacccctcaacacatacatcatctgtggctctcatccagtcatattgtccccctctcctgtgtcagcttgcctcctggctctgctctgtcatcccacttccttcatggcagggcagcagaatgaggcccttctccaccaggtctccctccagcagcctccttccctctctcagccatgaatgggtcccagacctacctcagcctccttatcagtgtcttcatgagaggctgaggacaagggacagatctggcccagcctccatgccctctgtgtcctatggcacctcagagcttctccgttgcccctcagtgtttcctagcagtgtggcacggaactgcacttggaacctagttttggtgttcttcacatccaaaactcttaagcccctcccgctgcccagcctgtccagagtatctcctgggcctgagaataagtggggtgggaagactggggccatgttgggttttttcattcaataaactggtgatttcttaccaaaaaaaaaaaaaaaa

SEQ ID NO: 3965 - DNA, 1272 bp, Rattus norvegicus
  Genbank Accession No. NM_134407
cgctgctgtacgctgcgcgtggcgctctgggccttcggtcgcgcgtcctctcgccatgtcccggtctccggcaccccgcgccgtctctggcgcccctctccggcccggtacggtgctgggcaccatggagatggggcgccgcatggatgcgagtgctagcgctgcgaccgtacgcgccttcctggagcgcggcctcaacgagctggacacggccttcatgtattgcgacggccagtccgaaagcatcctgggcagcctggggctcgggctgggcagcggcgactgcacagtgaaaattgccaccaaggccaacccttgggacgggaagtcgctgaagcctgacagtgtccggtcccaattagagacgtcattgaagcggctgcagtgtccccgggtggacctcttctacttacacgctcctgaccacggcactcctatcgtggagaccctgcaggcctgccaacagctgcatcaggagggcaagtttgtggagcttggcttgtccaactatgcctcctgggaggtagccgagatctataccctctgtaaaagcaacggctggatcctgccaactgtgtaccagggcatgtacaacgccaccacccggcaggtggagactgagctcctcccctgcctcagatacttcggactgaggttctatgcctacaaccctttggctggaggcctgctgactggcaaatacagatatgaagacaaggatgggaaacagcccgagggccgcttctttgggaatagctggtctgagacctacaggaaccgcttctggaaggaacaccactttgaggccattgccctggtagaaaaggccctgaagaccacctatggcaccagtgcccccagcatgacctcggctgccctgcgctggatgtaccatcactcacagctccagggcacccgaggggacgcagtcatcttgggcatgtccagcctggagcagctggagcagaacttggcggccactgaggaaggtcccctggagcccgctgtcgtggaggcctttaaccaagcctggaacgtggtcgcccacgagtgtcccaactacttcagatagactgtcgtgactcaagacgccagggcttttctgccaactcttagagtcacaccctggccactccttgcccagtgctgacctagtgtggtcttttctgctggtctccatccactccctgctcttttcccgtctgaataaagcaggcgtccgacctagctgcagcccggactgaaaaaaaaaaaaaaaaaaaaaaaaaaaaa

SEQ ID NO: 3966 - DNA, 5602 bp, Rattus norvegicus
  Genbank Accession No. NM_134408
gaaaatatttaaagggatcaataatggtgtcttctggttgcagaatgcgaagtctctggtttatcatgataatcagtttctcaccgaataccgaaggtttcagcagagcagccttgccattcgggttagttagacgagagctgtcctgtgaaggttattctatagacctgcgatgtccgggcagtgacgtcatcatgatcgagagcgcaaactacggtcggacggacgacaagatctgcgacgcagacccctttcagatggagaacacagactgctacctccctgatgccttcaaaatcatgactcaaaggtgcaacaaccgaacacagtgtgtagtagttaccgggtcagatgtatttcctgatccatgtcccggaacttacaaataccttgaagttcaatatgaatgtgtcccttacatggagcaaaaagtytttgtgtgtcctggaaccttgaaagcaattgtggactctccaagtatctatgaagctgagcaaaaggcaggtgcttggtgcaaggacccccttcaggctgcagataaaatttattttatgccctggactccctaccgcaccgataccttaatagaatatgcttctttagaagattttcaaaacagccgccagacaacaacatacaaacttccaaaccgagtggacggtactggatttgtggtgtatgacggggcagtcttcttcaacaaagaaagaacgagaaacattgttaaatttgacttgaggactagaatcaagagtggggaggccataatcaactacgccaactaccatgacacctcaccctacagatggggggggaagactgacattgacctggcagtggatgaaaatggcttgtgggtcatctacgccaccgagcagaacaacggaatgatcgtgattagccagctcaatccgtacactctccgattcgaagcaacctgggagacgacgtatgacaagcgtgcggcgtccaatgctttcatgatatgcggggtcctctacgtggtcaggtcagtgtaccaagacaatgaaagcgaagctggcaagaacgtcatcgactacatttacaacacaaggttgagccggggagagcacgtggacgttcccttccccaaccagtaccagtacatcgctgcagtggattacaacccaagagacaaccaactctacgtatggaacaataactttatcttacggtattctctggagtttggtccacccgaccctgcccaagtgcctaccacagctgtgacaataacttcttcagctgagctgttcaaaaccacagtgtcaaccacaagcagtacttcacagagaggccccgtgagcagcacagtcgctggtcctcaggaaggaagccgagggacaaagccacctccagcagtctctacaaccaaaattcctcctgtaacaaatatttttcccctgccagagagattctgcgaagcgttagaaatgaaggggataaagtggcctcagacacaaagggggatgatggttgagcgaccgtgtcccaagggaacaagaggaacggcctcgtatctctgcatggcttccacaggaacctggaacccgaagggcccggatcttagcaactgcacctctcactgggtgaatcagctggcccagaagatcagaagtggagagaatgctgcaagtctggccaacgaactggctaagcacaccaaggggacggtgttcgctggggatgtgagctcctctgtgaggctgatggaacagttggtggacatcctggatgcccagctgcaggagctgaaaccgagcgagaaggactcggccgggaggagttataacaagctccaaaaacgagagaagacatgcagggcttaccttaaggccattgtggacacagtagataaccttctgagagccgagactttggactgctggaaacacatgaattcctcagagcaggcgcacacagccaccatgctgttggacaccttggaagaaggagcatttgtcctggcagacaaccttttggaaccaacccgggtctcaatgccaacggataatattgttctagaagtcgctgtcctcagcacggaaggacaggtccaagacttcaccttccatctcggcttcaagggggccttcagctccatccagctctcagccaacaccgtcaagcaaaacagcagaaacgggctggcaaaggtggtattcatcatttaccggagtctgggaccattcctgagcaccgaaaatgcgaccgtcaaactgggcgcagacctcctgggtcggaacagcaccatcgcagtgaactcgcacgtcctttcagtctccatcaataaggagtccagccgtgtgtacttgacagacccggtgcttttttcaatgccacacattgattctgacaattatttcaacgcaaactgctccttctggaactactcagagagaaccatgatgggatattggtctacccagggctgcaagctggttgacactaataaaactcgcacgacgtgtgcatgcagccacctaaccaattttgctattctcatggcccacagggaaattgtgtacaaagatggcgtccacaaattgctgctgacagtcatcacctgggtgggcatcgttgtctccctcgtctgcctggctatctgcatcttcaccttctgcttcttccgaggcctgcaaagcgaccgcaacacgatccacaagaacctgtgtatcaacctcttcatcgctgagtttattttcctaataggcattgataaaacacagtacacgattgcgtgccccgtgtttgcaggactcctgcactttttcttcctggctgctttttcctggatgtgcctagaaggtgtgcagctctacctcatgttggttgaagttttcgagagtgaatactcaaggaagaagtattactatgtcgccgggtacctcttccctgccacagtggtcggtgtttcagctgctatcgactccaagagttacgggacactagaggcttgctggcttcacgttgataactatttcatatggagtttcattgggcctgttactttcatcattctgctaaatattattttcctggtgatcacgctgtgcaaaatggtgaaacattcaaacactttgaaaccagattctagcaggttggaaaacattaataattaccgtgtttgtgatggatactataatacggacttacctggctatgaagataataagccatttatcaagtcttgggtgctcggtgcgttcgccctgctgtgtctcctgggcctaacctggtcctttgggttgctttttgttaacgaggagaccgttgtcatggcttatctcttcaccgcctttaatgctttccagggactgtttattttcatcttccactgtgctcttcaaaagaaagtacggaaagagtatgccaagtgcttcagacactggtactgctgtggcggcctcccgaccgagagcccgcacagctctgtaaaggcgtccacctcccgcaccagtgctcgctactcctctggtacacagagccgtataagaaggatgtggaatgacaccgtgaggaagcagtctgaatcgtcttttatctcaggtgacatcaatagcacttctacccttaatcaaggaatgactggcaattacctactaacaaaccctcttcttcgaccccacggcactaacaacccctataacacattgctcgctgaaacagttgtatgtaatgccccttcagcgcccgtgtttaactcaccaggacattcactgaacaatacccgggacaccagcgccatggatactctaccgctaaatggtaacttcaacaacagctactccctgcgcaaggccgactaccacgacggcgtgcaggttgtggactgtggactaagtctgaacgacaccgcgtttgagaaaatgatcatttcagagttagtgcacaacaacctccggggtagcaacaaaacccacaacttggagctcaagctcccagttaaacccgtgattggcggcagcagcagcgaagatgacgcgatcgtggccgacgcctcatctttgatgcacggtgataacccagggctggaattccgccacaaagagctggaggcaccgctcatccctcagcggactcactcgcttctgtaccaaccccagaaaaaagtgaaacccgaggcaaccgacagctacgtctcccagctgacggccgaggccgacgagcacctccagtcccccaacagagactctctgtacacgagcatgcccaacctaagagactctccctacccggagagcagcccggacatggcagaggacctgtctccctccaggaggagcgagaacgaggacatttactacaaaagtatgcccaatcttggggctggccgccagctccagatgtgctaccagatcagcagaggcaatagcgatggctacatcatccccattaacaaagaagggtgcatcccagagggggacgtcagggaaggacagatgcagctggtaacaagtctttaatagtacagctaaggaattcctagggccacatgcaagtattaactgctaaagactgtgccagccggccctgcagctctccccaactcggccagtagaaccggctctgctggccggcggttctccactgtaggaaaaaaaaatggactgaacctcgcggttctgtgaatttttataaaacatgcaaaaactttgtatatacacagagtatactaaattgaattatttgttacaaagaaaaaagaaatgccaaccaggtattttacgtttctgctgctgtgtagagagattgtaaaacaaacaggagaccctcccagccatgatcccgcggcagttggtgaactgagtctgtaaatagaaccctaccgttttgggttttttttgtttgtttgtttgtttttgtttttgttttgtaggcctgcattgtattatatacaagacgtaggctttaagatcctgtgggacaaattgactgtatcttacttttcctgacaagacttggaaaagcaggagagagattctgcacccgtttgcacttccctgcaaaccttttacattaaggcagccaccgaaaccatgtttaaccagtagcaatcaagccacaggccttatctcatgtttcctcaactgtacaatgaactgttctcatgaagaaaaaaaaagttaatggctaaagaaaattatattttgttctattgctagggtaaaaataaatacatttgtgtccaactgagatatcattaaaataattttaaaaagagtttggagaaaatatcgtgtcaagctcttggttgcacaaaataggcgatgtctcttctcccacccaccatggtgagtttgtgcccctctttgttggttcccactgtagacggtgtctgctctgaccgcttagccccctttcttacacttaaatttcttattgccaaaagagtgtgttttatggggagaaaactctttgaagtcctgccatgccttgcacaaatgtggggaaatctggaggtcttgagtcaaccctctgtttattctggaacagagggcgaaggggtcactgggcacttctcacaaactttctagtgaacaaaaggtgcctattcttttataaaaaaaaaaaaaaaaaa

SEQ ID NO: 3967 - DNA, 1330 bp, Rattus norvegicus
  Genbank Accession No. NM_134410
gggttagtttaacatgggttcctccagctccaccgctctggctcgccttggactccccgggcagccgcggtccacctggctcggcgtcgccgcgctgggactggccgcagtggcgctggggaccgtggcctggcgtcgcgcgcgtccccggcggcgccggcagctgcagcaagtgggcacggtgtcgaaggtttggatctacccgatcaagtcctgcaagggggtgtcggtgtgcgagactgagtgcaccgacatggggctgcgctgcggcaaagtgcgcgacaggttttggatggtggttaaggaagatggtcacatgatcactgcccgccaggagcctcgccttgtgctggtcaccatcaccttggagaacaattacctgatgctcgaagctccaggcatggagccgatagttctgcctatcaagctgccctcttcgaataagatccacgactgcaggttgtttggcctcgacattaaaggcagggattgtggcgatgaggtggcccggtggttcaccagctacctaaagacgcaagcctacaggttggttcagtttgataccaaaatgaaaggaaggacaacaaagaaactctacccgtcggagagctaccttcagaactatgaggtcgcctacccagactgcagccctatccacctgatttctgaagcctccttagtggatctcaacaccaggctgcagaagaaagtgaagatggagtatttcaggccgaacatcgtggtgtcaggctgcgaggctttcgaggaggacacctgggatgagctcttgattggtgacgtagagatgaagagggtgttgagctgccccaggtgcgtgttgactacagtggacccagacaccggcatcatagacaggaaagagccgctggagaccctgaagagctatcgcctgtgtgatccttctgtgaagagtttataccagtcgtctccactctttgggatgtatttctcagtggaaaaaattggaagcctgagagtgggtgaccctgtgtatcggatggtggattagtggatcccgtggactgactcggtttggattattcacaactgacagtctgagtaacagagtgatggggaatcttgtcatttactcggcttccctgggagacgacgcatctgcaagtcctcacggccatcttcctggaaatggatctctgttcttcctctggagctgcacatgcccgagttcattcaagaaagctaccagaggtggtttgggaatgtgacggtgtataaattttagataatgaggttttaaaaaattaaacggaattgttactcccacggttaaaaaaaaaaaaaaaaaaaa

SEQ ID NO: 3968 - DNA, 1434 bp, Rattus norvegicus
  Genbank Accession No. NM_134432
atgactcccacgggggcaggcctgaaggccaccatcttctgcatcctgacctgggtcagcctgacagctggggaccgcgtatacatccacccctttcatctcctctactacagcaagagcacctgcgcccagctggagaaccccagtgtggagacgctcccagagccaacctttgagcctgtgcccattcaggccaagacctcccccgtggatgagaagaccctgcgagataagctcgtgctggccactgagaagctagaggctgaggatcggcagcgagctgcccaggtcgcgatgattgccaacttcatgggtttccgcatgtacaagatgctgagtgaggcaagaggtgtagccagtggggccgtcctctctccaccggccctctttggcaccctggtctctttctaccttggatcgttggatcccacggccagccagctgcaggtgctgctgggcgtccctgtgaaggagggagactgcacctcccggctggacggacataaggtcctcactgccctgcaggctgttcagggcttgctggtcacccagggtggaagcagcagccagacacccctgctacagtccaccgtggtgggcctcttcactgccccaggcttgcgcctaaaacagccatttgttgagagcttgggtcccttcacccccgccatcttccctcgctctctggacttatccactgacccagttcttgctgcccagaaaatcaacaggtttgtgcaggctgtgacagggtggaagatgaacttgccactagagggggtcagcacggacagcaccctatttttcaacacctacgttcacttccaagggaagatgagaggcttctcccagctgactgggctccatgagttctgggtggacaacagcacctcagtgtctgtgcccatgctctcgggcactggcaacttccagcactggagtgacgcccagaacaacttctccgtgacacgcgtgcccctgggtgagagtgtcaccctgctgctgatccagccccagtgcgcctcagatctcgacagggtggaggtcctcgtcttccagcacgacttcctgacttggataaagaacccgcctcctcgggccatccgtctgaccctgccgcagctggaaattcggggatcctacaacctgcaggacctgctggctcaggccaagctgtctacccttttgggtgctgaggcaaatctgggcaagatgggtgacaccaacccccgagtgggagaggttctcaacagcatcctccttgaactccaagcaggcgaggaggagcagcccacagagtctgcccagcagcctggctcacccgaggtgctggacgtgaccctgagcagtccgttcctgttcgccatctacgagcgggactcaggtgcgctgcactttctgggcagagtggataacccccaaaatgtggtgtga

SEQ ID NO: 3969 - DNA, 1049 bp, Rattus norvegicus
  Genbank Accession No. NM_134449
gccttcggttttagggagagcaggccgggcggtcagagatcatgggggagagcgcactggagcccgggcctgtgcccggggcgccggctgggggtccggtgcacgccgtcaccgtggtgactttgctggagaagctggccaccatgctagaggcgctgcgggagaggcaggggggcctggctgagaggcagggcggcctggcgggctcggtgcgccgcatccagagtggcctgggcgcgctgagtcgcagccacgacaccaccagcaacacactggcgcagctgctggccaaggcggagcgcgtgggctcccacgccgacgcagcccaggagcgggcagtgcaccgcgccgctcaggtgcagcgactggaggccaaccacgggttgctggtggcgcgcgggaagctgcacgtcctgctcttcaaggaggagactgaaattccagcccgcgccttccagaaagcaccagagctcttgggcccggaggaccagttggtgctaggcccagagcagccagaggatgaagttggagagagttctgatgaggaacccgtggagtcccgggctcagcggctgcgacgcactggcttacagaaggttcaaagcctgaaaagggctttttccagtcgtaaaggctctgaagcagcacagcccacgccagtcaagccgccacgcctaggtcctgtccggaactccgaaggcccggcagaaggccagcctgcagctcagcctgcaatggagcctgtgctcccgtctgccctggagccagaacctcctcagcctaccaaggaagatcctgagagacctgtgcttcaaatagagagcgcagcctgatccctggggctgcctgccccattcagcccttatgccttgtcccaaaaataaatactaatcgagtgcagcacttacatccaaataaggagagaatcctgcatccactgcccggctccaatccttccttcctggttttccagtctggtaccctgtgtcctctgaaagaggaacattcggccttgtttaggttcaccaccaataaaagtaattttctct

SEQ ID NO: 3970 - DNA, 5551 bp, Rattus norvegicus
  Genbank Accession No. NM_134452
ctggcatggacgtacacacccgctggaaagctccgcgcccgggcgccccgctgctgtcctcgccgctgctcctgctcctgctgctgctgtgggcgccgcctccgagccgcgcagctcagccaacagatcttctggagatgctagattttcacaatttgccctcaggcgtaacgaaaaccacaggtttctgtgccactcgacgatcttccaaagagccggatgttgcctaccgagtctctaaagatgcacagctcagcatgcccaccaagcagctgtaccctgagtctgactttcctgaggacttctccatcctgacaaccgtgaaagccaagaaaggcagtcaggccttcctggtctccgtttacaatgagcagggcatccagcagttgggactggagctgggccgctcccctgtcttcctctatgaggaccacacagggaagcccgggcctgaagagtatccactcttccctggcatcaacctgtccgatggcaagtggcaccgaatcgctatcagtgtatacaagaaaaatgtcaccttgatcctcgactgtaaaaagaagatcacgaagttcctcaaccgcggcgaccaccccataatagatgtcaacggtatcatcatgtttggctcccggattctggatgatgaaatatttgagggtgacatccaacagttgctcttcgtctccgaccaccgagctgcctatgattactgtgagcactacagccccgactgtgacacagcggtccctgacacacctcagtcacaggaccctaacccagatgaatattacccagaaggagagggtgagacctattactatgagtacccatattatgaagaccctgaagacccgggaaaggagcccgccccctctcagaagccagtggaagccgccagagaaaccacggaggttcctgaggagcagacccagcccccatccgaagcccctacagtgcctgagaccagtgacacggctggcaaggaggacaatccagggatcggggactacgactatgtgcccactgacgactactacactacatccccgtatgaagacttcggctatggcgagggcgtggagaaccccgaccagcccaccaaccctgactcaggggccgagatccccaccagcaccagtgttacctccaattcctccaatccggctccatctccagaggaagggaaggatgacctgggaggtgagttcaccgaggagaccatcaagaatctagatgaaaactactacgacccgtactttgacccggactccgactccaatgtctctccatcggagatagggccaggcatgcctgctaaccaggacaccatctatgaagggattggaggaccccgaggtgagaaagggcaaaagggagaaccagccatcattgagccgggaatgctgatagaggggccccctggccctgaaggccctgctggtcttccaggacctccaggaactacgggtcctactggccaaatgggtgaccctggagaaaggggtccccctgggcgcccaggtcttcctggggctgatggcttgccaggtccccccgggaccatgctcatgctgccgttccgttttggaggtggtggcgacgccggttctaagggccccatggtctctgcccaggaatcccaggcacaggctatccttcagcaagccaggttggcactaaggggaccagctggtccaatgggtctcaccgggagacctggccccatgggtcctcctgggagtggaggtttgaagggtgagccaggagacatgggacctcagggtcctcgaggtgtgcaaggtccacccggcccaacagggaagcctggaagacggggccgtgctgggagtgatggtgccagaggcatgcctggacaaacaggccccaagggtgaccgtggctttgatggtctggctgggttgccgggagagaaaggccatagaggtgaccctggtccttctggcccgccgggactcccaggagatgatggagaaaggggtgacgatggagaagttgggcccagggggctgcctggggagcctggaccacgtggtctgcttgggccaaaaggcccccctggcccacctggacctcctggtgtgacgggtatggatggccagcctggccccaaaggaaatgtgggtccccagggagagcctgggcccccaggacagcagggtaatcctggtgcccagggtcttcccggtccccagggtgccattggtcctccaggagaaaagggtcctttggggaaaccaggtctcccaggaatgcccggagctgatggacccccggggcaccctggcaaagaaggtcctccaggagagaaaggaggccagggtcctcccggcccccagggtcccattggctacccaggtccacgaggagtcaagggggcagatggcatccgagggctgaagggcaccaagggagagaagggtgaagacggcttccctgggtttaaaggcgacatgggaataaagggtgaccggggggagatcggcccacccggcccccgaggagaagatggtcctgaaggcccaaaaggtcgaggtggtcccaatggtgatcctggtcccctggggcccaccggggagaaggggaagctcggagtgccaggattaccagggtacccaggaagacaagggccaaagggttctattggattccctggcttcccgggcgccaacggagagaaaggtggcagggggacacctggaaagccaggaccacggggacagcgaggcccaacgggcccgaggggtgaacgaggcccacggggcatcactgggaagcctggccctaagggcaactcaggaggtgatggcccagccggccctcctggtgagcggggacccaatggaccccaaggccccaccggcttccctggacctaagggtcccccgggtccaccaggcaaggacgggctccccggacatcctgggcagagaggggagactggtttccaaggcaagactggccctccaggccctccaggagtggttggccctcagggtcccacaggcgagacgggtcccatgggggagcgtggccaccctggtcctccaggcccccctggtgaacagggcctcccaggtgctgctgggaaagaagggacgaagggtgacccaggtcctgctggcctccctgggaaggatggacctccaggattgcgtggattccctggggaccgagggctccccggccccgtgggagcactcggactgaaaggcagcgaaggcccccctggccccccaggtcctgcgggttctccaggggagagaggaccagctggtgctgctggacccattggaattccagggagacctgggcctcagggacctccggggcctgctggagagaaaggggttcctggagaggaaggtccgcaaggcccggctggccgagatggcctgcaaggtcccgtggggctccctggaccagccggccccgtgggtcctcctggagaagatggagataagggagagatcggagagcccgggcagaaagggagcaagggcgacaaaggcgagcagggtcctcctgggcctaccggtcctcaaggccccactgggcagccaggcccttcgggagcagatggtgaacctggccctcgtggacagcagggcctgtttgggcagaaaggagatgaaggttcaagaggtttcccaggaccgccagggccagtgggcttgcagggtttaccaggacctccaggagaaaagggtgagacaggagacgtgggccagatgggccctcctggtccaccaggcccccgaggaccctctggagctccaggagctgatgggccacagggtcctccaggagggattggcaaccctggtgcagtcggagaaaagggagagcctggcgaagctggagagcctggccttccaggagaaggaggtcccctgggacctaaaggagaaagaggggagaagggagaggctggcccctctggtgctgctggaccccctggacccaaaggcccacctggagatgatggccccaaaggcagccccggccccgtgggctttcctggagaccctgggccccctggagagccaggcccagcaggtcaagatggcccacctggtgacaaaggggatgatggagaacctgggcagacgggatccccaggccctactggtgaacctggtccatctgggcctccaggaaagaggggtccaccgggccctgcaggccctgaaggcaggcagggggagaaaggagccaagggagaagctggcttagaaggccctcctgggaagactggccccattggtccccaaggggcccctgggaagcctggccctgatggtcttcgtgggatccctggtcctgtgggtgagcaaggcctcccaggatccccaggccctgatggtccacccggccccatgggtcctccaggactccctggcctcaaaggagactccggtcccaaaggtgaaaagggccatccgggcctgattggactcatcggacctccgggcgaacaaggtgaaaaaggtgaccgaggactcccaggcccccagggctcatctggtcctaaaggagaacagggcattacaggtccttctggcccgcttgggcctcctggtcccccaggcttgccgggccctccaggtcccaaaggtgctaaaggttcatcgggtcccactggcccgaagggcgaggcaggccatccaggactccctggtccacccgggcctccaggcgaggtcatccagcccctgccaatccaggcgtccaggactcggcggaacattgatgccagtcagctcctggatgatggggctggggagagctacgtggattatgcagatggcatggaagagatctttggttccctcaactccctgaagctggagattgagcagatgaagcggccactgggcacacagcagaacccagcccgtacctgcaaggaccttcaactctgccatcctgatttcccagacggcgaatactgggtcgatcccaaccaagggtgctccagggactccttcaaagtctactgcaatttcacagctggagggtccacgtgcgtcttccctgacaagaagtctgagggagccagaatcacttcttggcccaaagaaaacccaggttcctggttcagtgaattcaagcgtgggaaactgctctcctatgtggatgctgaaggcaaccctgtgggcgtggtacaaatgaccttcctgcggctgctgagtgcctctgcccagcagaacatcacctacaactgctaccagtccgtggcctggcaggatgccgccacaggcagctacgataaggctatccgcttcttgggctccaacgatgaggaaatgtcttatgataacaacccctacatccgtgccctggtggatggctgtgctaccaagaaaggctaccagaagacggtgctggagattgacacgcccaaagttgagcaagtccccattgtggacatcatgttcaccgactttggtgaagcctcacagaaatttggatttgaagtagggccagcttgcttcctaggctaggagctgtgagcccaccgtctacc

SEQ ID NO: 3971 - DNA, 721 bp, Rattus norvegicus
  Genbank Accession No. NM_134458
gagtttggtggcgggaaaggccatgagtaaaagccgggccgaagctgcggctggagcccccgggatcgtcctaaggtacctgcaggaacaaaaccggccctacagcgcccaggacgtgttcgggaacctgcagaaggaacatggactgggcaaggcggcggtggtgaaggcactcgatcagctggcccagcaaggcaagatcaaagagaagacttacggcaagcagaagatatattttgccgatcaggaccagtttgacacagtgagtgatgcggacctccacagtctggatgccagtatcatggccctcactgccaaggtgcagggcttacagcagagctgccggcacatggaggctgagctgaaggaattaacaagtgcgctgaccactcctgagatgcagacagagattcaggagttgaagaaggagtgtgctcgctacacagagagactgaagaacatcaaagcagctaccaaccatgtcactccagaagagaaggagaaggtgtacagggagagacagaagtactgtaaagagtggaggaagcggaagagaatgaccacagagctgtgcgatgcgatccttgaaggttaccccaagagcaagaagcagttctttgaagaagttgggatagagacagatgaagatcataatgttacgctcccaaacccctgaggggcccttgatggaggtgggaacagaccgtcctgctttggccac

SEQ ID NO: 3972 - DNA, 912 bp, Rattus norvegicus
  Genbank Accession No. NM_138502
atgcctgaggcaagttcacccaggcgaactccacagaacgtcccctaccaggaccttcctcacctggtcaatgcggatggacagtacctcttttgtaggtactggaagcccagtggcacacccaaggccctcatcttcgtgtcccatggagctggggaacactgtggccgttatgacgagctggctcagatgttgaagaggctggacatgctggtgtttgcccatgaccatgttggccatgggcagagcgagggagagaggatggtggtatcggacttccaagtttttgtcagagatttgttgcagcacgtgaacaccgtccagaaggactaccccgaggtccccgtcttcctcctgggccactccatgggcggtgccatctccatcctagcagctgcagagagaccaacccacttttctggcatgatcctaatttcacctctgatccttgccaatccggaatctgcatcgactttgaaggtccttgctgccaaactgctcaattttgtcctgccaaacatatccttggggcgcatcgactccagcgtgctgtctcggaacaagtcggaggttgacctgtacaactccgacccactcatctgccacgcaggggtgaaggtatgctttggcatccagctgctgaacgctgtctcgagggtggagcgagcaatgcccaggctgacactgccgttcctgctgctgcagggttctgctgaccggctttgcgacagcaaaggtgcctacctgctcatggaatcatccccgagtcaggacaaaacactcaagatgtatgaaggtgcctaccatgttctccacaaggagcttccggaagtgaccaactctgtcctccatgaaataaatacgtgggtgtctcacaggatagcagtggcaggagctaggtgtctaccctga

SEQ ID NO: 3973 - DNA, 2599 bp, Rattus norvegicus
  Genbank Accession No. NM_138508
taaagcttcagtctgtaggaggttgttctctttgctgctagagccatgccttcagtcgcgttgaactctccgcgcctgcgccgggtgttcgtggtgggagttggcatgaccaagttcatgaagcctggaggtgagaattcaagagactatcctgatttggcaaaagaagcaggccagaaggcattggcggacgcgcagatcccttactccgcagtggagcaggcgtgcgttggctatgtgtacggtgaatccacctgcgggcagagggccatctatcacagcctggggctgactggcatccctatcattaatgtcaacaataactgctctaccggttctactgctttgtttatggcccagcaactggttcagggaggtttagcaaattgcgtgttagctcttgggtttgagaagatggaaaagggatcccttggtaccaaatattcagatcggtcaaatccactggaaaaacatattgacgtcttgatcaataagtatggaatgtctgcctgtccatttgctcctcagctgtttgggagcgctgggaaagaacatatggaaacatatggaacaaaggttgaacactttgcaaaaattggatggaaaaatcataaacactcagttaataacccgtattcccagttccaagatgaatacagcttagatgagataatgaaatcaaggccagttttcgattttctgactgtcttacaatgctgtcccacctcagatggtgccgcagcagcaattgtgtctagtgaggagtttgtgcagaagcatggcctgcagtccaaagctgtggaaattgtggcacaggagatggtgactgacatgcccagtacatttgaagaaaaaagtgttattaaaatggttggctatgatatgagtaaagaagctgccaggaagtgctatgagaagtccggcctgggtcccagtgatgtcgacgtgatagagcttcacgattgcttctctaccaatgaactcctgacttacgaagcactggggctctgtccagaaggacaaggtggagcactggtggacagaggggacaacacttacggaggaaagtgggtcataaaccctagtggaggcctcatctccaagggacacccactgggtgccacaggtctggctcagtgcgcggagctctgctggcagctgagaggcgaagccggaaagaggcaggttcctggggcaaaggtggctctgcagcacaatttaggccttggaggagctgctgttgtcaccctctacagaatgggttttcccgaagctgccagctccttcagaacgcaccagatttcagctgctcccaccagctctgcaggggatggattcaaggcaaatctcatttttaaggaaatcgagaagaagcttgaagaggaaggggaagagttcgtgaagaaaatcggtggcatttttgccttcaaagtgaaggatggccccgggggcaaagaagctacgtgggtggtggacgtgaagaacggcaaaggatcggtgcttccggattcagataagaaggctgactgcacaatcaccatggctgactcagacttgctggctttgatgactggtaaaatgaaccctcagtcggccttttttcaaggtaaactgaaaattgccggtaacatgggcctggccatgaaactgcaaagcctgcagcttcagccggacaaagctaagctgtgaagagtccctttggcaacctcaggacatcaagatgagatgtgtggatacgtagaaatccacgtctccctgtcaggacttagactgacacttcctgaatagcatgagatagatttcttgctaggtggctatggccaattgtatttcccccaagctgggggtgcaaagggcctcccaggctacactgctgctttgaggacttgcattctactgtgcttcatgaagctactatgttaatgatggtttggggtaaacttgagtttcagaataaagttcagaatagtaaaatctaaagactgtgtaaacagagcccttgttttgcttagaagtacatttaaggatcgtcgtgttggacactcggtgtgacagtttccccttagagggactggagaagaaacagatttccagagttgaccaggaattagtgcctcacacttaattacctgcatcagtttctcactaatagttcttaaaataaaattctgtactgagtgtttaaaaaaaaactttaaaaatgttcttttcatgccatcagaaacagttcttttcttcccaaataaaatacaagaattatggtcagagcttaagagagaatttacagctgaacagagctgtttttaaaatatttttaaagtgggcatcttttaaaaaaaatcagcatcggagctatgggatgccattgctaaaaataattgaataaagtttcttccagagatacaggcttcaaattatattttcatactagtaagtttataaactgggtctcacaaatttcctctttcatgcatttggttgtctgcatttatctttcttcctggtttttctaactctaacgctgtttgttataatttaggtttgggataaaaatatgcttttggaagatttaaaaagaaaattaaaacagctcttcctg

SEQ ID NO: 3974 - DNA, 1215 bp, Rattus norvegicus
  Genbank Accession No. NM_138510
ggcacgagagaaagcgactcttctagggaagagcagcatctgagaatgaattccaaaattcagaagatggagttaaacgatggtcactccatccctgtactgggctttggcacctatgcaaccgaagagaatctcagaaaaaagtctatggagtccacgaaaatagctatagatgttgggttccgccatattgattgttctcacttgtaccagaatgaagaagagataggtcaggccattgtaagcaagattgaagatggcactgtgaaaagggaagatatattctatacttcaaagctttggtcaacttcccatcgtccagagttggtcagacccagcttggaaaattcactgaggaaacttaatttggactatgtagacctctatctcattcatttcccggtatctctgaagccaggggatgagcttttacctcaagatgagcatggaaacttaatacttgacacagtggatctctgcgacacctgggaggccatggagaagtgtaaggatgcaggattggccaagtccatcggggtgtccaactttaaccgcaggcagctggagaagatcctgaataagccggggctcaagcacaggcctgtgtgcaaccaggtagaatgccatctttatctcaaccagagcaagctgctcgcttactgcaagatgaatgacatcgttctggttgcctatggtgccctgggaactcagagatacaaatactgtattaatgaagataccccagttctcttggatgatcccattctttgtaccatggcaaagaagtacaagcggactccagccctgattgcccttcgctaccagctggagcgtgggattgtgaccctagtcaagagtttcaatgaggagagaatcagagagaacctgcaggtctttgatttccagttggcttcagatgacatggaaattttagataacctggacagaaatcttcggtactttcctgctaatatgtttaaggctcaccctaactttccattctctgatgaatactaagatggcagccctagccatgagttctgctcgaagctcctttgtgtgatgctcgactctcagaggccaataatacaacacactgactccaatccatactgcttagcaactcacccccagtttgagctgtgtctgtacatcggggagcaaattcactaaattttcctgcttttctgtaaataaataaaaatattttgcttc

SEQ ID NO: 3975 - DNA, 925 bp, Rattus norvegicus
  Genbank Accession No. NM_138517
tcttctagagctgaaaagagagcaaggacaacactctcgacggtgggacctaggtggccttccagggaagatgaacctcctcttgctcctgctgaccgtctctctggcccccacgacagaggcagcggagatcatcgggggacatgaagccgatccccactctcgaccctacatggcctatcttcagtacaagaatgaggattctcgggatacaatatgtggtggtttccttatacgagaggactttgtgctgactgctgctcactgttcagggagcaaaataaatgtcacattgggggcccacaacatcaaagaacaggagaagacgcagcaagtcatccctgtggtgaaaatcattccacacccagcgtataatgctaagacaatctccaatgacatcatgctattaaagctgaagagtaaggccaagaggactagagctgtgaagactctcagtctgcccagaagcaacttcaaagtgaagccaggagatgtgtgctatgtggctggttggggaaagctgggcccaatgggcaaattcccagacaaactgcaagaggttgagctaacagtacaggaggatcaggagtgtgagacttacttaaaaaatgcttacgacaaagccaatcagatatgtgcgggggacccaaagatcaaatgtgcttcctttcagggggactctggagggcctcttgtgtgtaaaaaagtggccgcaggcatcgtctcctatggacgtaaagatggttcaactccacgggcattcaccaaagtctcgactttcctatcctggatagaggaaactatgaaaaagagctaactacaagatgcaacgtggatcatttcctgactaaccaccttccctatagctgagtccaggattgctctaggatagatggcagcaactgaataaagcattttttctgac

SEQ ID NO: 3976 - DNA, 1263 bp, Rattus norvegicus
  Genbank Accession No. NM_138530
gccagtgaggaagatgaagctcccgattttcatagcagatgcgttcacagtgacggctttccgaggtaatcctgccgcagtctgcctgctggagagcatactccaggaagacgcccatcagcaaattgcgagggaaatgaacctctcagaaacggctttcatccggaaactgcagccgacggacagcttctcacaaagttcttgctttggactaaggtggtttacgccagtgagtgaagtccccttgtgtggccacgccaggatggcctctgcggctgtgctgtttcacaaaataaagaacgtgaacagcaccctgacctttgtcactctgagcggggaactaaaggccagaagagcagaagacgggattgtcctggactttcctctctacccaaccttcccccaggacttccatgaagttaaagacttgataaaggcagccataggtgacactacagtccaggacatccagtattctccagatacccgaaaactcctggtccggctcagcgattcttatgacaggtcctttctagagagcctgaaggtgaacacagagcctctgcctggaattgagaagacaggaaaggtgaaaggcctcatcctcactgtcaaaggagagtctggggggcaaacaaccccatatgacttctactccagatactttgcgcctcgggttggtgtacctgaagacccggtaacaggatctgcacacaccgttctcagcagttactggtcccagcaggtggggaagaaagagatgcgagcctttcagtgttcctgccgaggaggggagctggacatttccctgcgacctgatgggcgggttgacatgaaaggcggagccgctgttgtcttggagggcatgctgacagcctagagatgcttatgctgggcttgcagctcaactcttctctacagccaagaacccaacccaacccaaccaaaccagcaccaagtggtgccctcagtcctctcgtgaagaccagagaagggaagacatttgatggaggtgctgaatcctctcctgattctccagaatcctctcctggtggtgggctccgggctctgcctgtgtatgcatcttcagtccctatagcagacacggatgctgtcccttcttttgattatgactgccaaagcaagagatgcattgataaggagccagatgaagccatttcaatcccagttgggtaccttagggtatttcacagccttgtagaagaataaatatctgtgtagaaaaaaaaaaaaaaaaaaaaa

SEQ ID NO: 3977 - DNA, 2325 bp, Rattus norvegicus
  Genbank Accession No. NM_138533
tacacatacacacttgccaagtggagaatgcccggccacatccccagccacatctgtggcaaagttcagacagggcaccaatgtggtctctggccccagactcctatccctgaacacagagccccgtgcttgcaccacccagagacagcttgtgagaggagggaggagggcggagaaagagggaagggagagggaaagacaaagaaaggggtgcggcagggcagcagttagcccgagggggcggagagtgagctcagcctggagcaggtcttaacagtcagaacgttgtgagaaggttgaggagagcagctcctgccacagaaaagcttcttgcttcctggtctcaagccccttctttctgggaccaggcactgaggcagcagacaggaagagctggggcccgtctgctggccagaggcactaatcttgggcataaacaggatctccaagctctgggaccagtcctgcagctgacagcccagcagcctgcccctgacgctcttgctaggtgatggaaaacgtgagtttttccctggacagaactctttgggtcttcctcctggccatgctaggctccaccgcaggccagccgctggggggagaatctgtctgcacagcccggcctctggctagatacagcatcactttcactggcaagtggagccagacagcatttcccaagcagtatcctctgttccggccccctgcacagtggtcctctctgctgggggcagcacacagctctgactacagcatgtggcggaagaatgagtacgtcagcaatgggctgagggacttcgctgagcgtggtgaggcctgggcactgatgaaagagatcgaagcagcaggagagaagctccagagtgtgcacgcggtattctcggctcccgccgtgcctagtggtaccgggcagacttctgcagagttagaggtgcaccctaggcactcgctggtgtccttcgtggtacgcattgtccccagtccggactggtttgtgggcatcgacagtctggacctgtgcgagggaggccgctggaaggagcaggtggtccttgatctttacccacacgatgcagggacagacagtggcttcaccttctcctcccccaactttgcaaccatcccacaagacacagtgactgagataaccgcctcatcgcccagtcacccagccaactcattctactacccacgcctcaagtccttgccacccattgccaaagtgaccttcgtgcggctacggcagagtcccagagcctttgccccaccttccctggacctggccagcagaggaaatgaaatcgttgacagcctttcagttccagagacaccgctggactgcgaagtttccctgtggtcatcctggggactgtgcggagggccatgtggaaagttgggagccaagagcagaactcgctatgtgcgtgttcagcctgctaacaatgggactccctgtcccgagcttgaagaagaggctgagtgtgccccagataactgtgtctaaacccagaccccagtagccagcccttaggatccctcgagccttggactctgatctgggccacaaagtgttttcaggaggcccgtgtaggcagggatgagagcatgggcaattttgcaccatttcccaccattcctgggttgacagatggtcttgatacagaggccctcagtgacaggtaagacacagactgcctctcccactgtgtgattcctgaggatcatgggtttgatatacataaattcccttgaaatttataactgtggtgggagggaggctgcctttgatacagagagaaggcattccaggaacaggtgagaggatgccctaagcctgtgagccccacaaccacactgctgtcagatacctcagacctgctgccactgcacttgctcctggaggccaagaagtcaaccttcacaccactcttgagctcaccctggggtgaccacaggaggggcaaatgaagaggggcagttttggaaacttggagcttttgtgtcactgatccctttgcattcaaataaaggttgaggtcctacgcaagaaatatgagccaacggttgaaactgtgcgttccattgccagatacattggtcacattcaagatgtctccaatccgatggcataggttatcacatcagtaagcgatccccaaacttcattttcttccagagcatttcattttgtgttatcctgataatcaccatatcggagccaccatgggggtgagcttgactcccttccctgacacacttttaactggacaccaacagtaaggacctaggcaaaggctaattgatagatagaagtgtatcacagcg

SEQ ID NO: 3978 - DNA, 2466 bp, Rattus norvegicus
  Genbank Accession No. NM_138547
tttaaatagtaagaaaaaattcacagacagaaaaatttttgttaccaggtggccataaagaggtttcttgcccacagtgaactgatagctgtgacccacgtgtggttcctatggcgtcttggaagtacctccaaccctgtgaaagtgcattcctcacacagggctgtctcagaacagtcagaagaccctcgccagacccaagacctgcttggttgcatgagtaacaagcgatggattccatatctctgcgtgtagcactaaatgatggtaacttcattcctgtactggggtttggaaccactgtgcctgagaaggttgctaaggatgaagttatcaaggctactaaaatagctatagataatggattccgccattttgactctgcttatttgtacgaagtagaagaggaagtgggccaagccattagaagcaagattgaagacggcactgtgaagagagaagatatattctatacttcaaagctttggagcactttccatagaccagagctggtccgaacttgcttggaaaagacactgaaaagcactcaactggactatgtggatctttatattattcatttcccaatggctttgcagcctggagatatatttttcccacgagatgagcatggaaaactattgtttgaaacagtggatatctgtgacacatgggaggccatggagaagtgtaaggatgcaggattggccaagtctattggggtgtccaactttaactgcaggcagctggagaggattctgaataagccagggctcaaatacaagcctgtgtgcaaccaggtggaatgtcacctttatctcaaccagagcaaaatgctggactattgtaagtcaaaagacatcattctggtttcctactgcacgctgggaagttcacgagacaaaacatgggtggatcagaaaagtccagttctcctagatgatccagttctttgtgccatagcaaagaagtacaagcaaaccccagccctagttgcccttcgctaccagctgcagcgtggggttgtgcccctgatcaggagtttcaacgcgaagcggatcaaagagctaacacaggtttttgaattccagttggcttcagaggacatgaaagccctggatggcttgaacagaaatttcagatacaacaatgcaaaatattttgatgaccatcccaatcatccatttactgatgaatagtaacatggtggactttgtcagcatttctatcggaagatctgtttatgcattgtgatttgaaagatatcttggatactggtgactgaatgcatcagaccactgtttctgttaattcacagtcagctggagcaatgtccacagtgctatgagggaagccatgtttttgtcacactctgaaatggaacatcacgttgcttttccttgtgtttttaaatattcatttattttgctttccatatatgaatattttccctacatgtatgtgtatctcatgaatgtctatgtccatgcagggttgaagagtgttgcaggtcacttggaaccggagttacattgattatggagttaccatgtgggtgctgggagccaaacctaggtcttctgtgagactagcaagtgcctttgaatgctgagccatctcattaggtccaaccctaaagatccttgcctgccactatttctgtgatctcaatgttttgttttctcctgacttctgacaccaagctgatttgctagaagtcttgggcatgaagtgggtgttgaggacagttattgcaaagggatttctgggtgggagttgaaagaacgttcaacattcagggaattaattgttcgaggttattgattagtcaatattccccatattctttgaggaagaagaaagtactccatagattttccctttttcttagttttgaggtagggcacctgtggcaggagtgaccaagagacccagggttctctccaacagcccaagaaccagagctccaagaacctggagagcaagttcttgtgggaaggttggaatgttggtaagaagagaaccaatctaaaagcatcatcatgattcagatgtggggagtttgagaggaaatttgaatgtgtctctctttttgggaaatatatcatcttttttctttttgtaattacatgttgggagcaatgcccttgaaaccctccattattgatgtaatggttagaattaagtatgactgggttcatggaaaatccccagccagctgcagaagactaatacaaatctggtggtcaggatgaataatgatatgataaagttctgaccttgctgagaaatacatctgacatcaagatacccaatgtgatgacctgtaagctttctgaaaaaccaacatcctgttgacatcagctgactacatgtatactgtgcccttggcctgtgtaaatgtttcacacttcccccctccctctgttacccatgttatggtataaattcagccttggtaaaaaa

SEQ ID NO: 3979 - DNA, 737 bp, Rattus norvegicus
  Genbank Accession No. NM_138548
cctgtatgaaagttccgagcttgcagctgtagggaaccacgtaaggccagggcgcgtttccggtgcgggcagtcgccaccagagttaaagaccgggcgtcagaaggggaccatggccaacagcgagcgtaccttcatcgccatcaagcctgatggggtccagcgggggcttgtgggagagatcatcaagcgattcgagcagaagggattccgcctggttggtttgaaatttatacaggcttcagaggatcttctcaaggagcactacattgacctgaaggaccgccccttcttttctggcctggtgaagtacatgcactcaggaccggtggttgctatggtctgggagggactgaatgttgtgaagacaggccgggtgatgcttggagagaccaaccccgcagactctaagcctgggaccatacgaggagacttttgcattcaagttggcaggaacatcattcatggcagcgattctgtggagagtgcggagaaggagatcagtttgtggtttcagcctgaggagctggtggactacaagagctgtgcgcagaactggatctatgagtgacagcagggcccctgctttttttctgtctactgacccttgatctcacaggcaggggagcagcagctctagatctttctggaacttctctgaactggaagaagcctctgggcgctgtgactccctgtgcagtgttaagtgccactggtagattaaagtgttttgtctgt

SEQ ID NO: 3980 - DNA, 1178 bp, Rattus norvegicus
  Genbank Accession No. NM_138549
agaagggacgcacgcatagagaggggcggagccggagccctggagtgctgctccttgtgtgtgtggggctgggtggtggttggtgcggcagggcggctactcagctgcagcagtgcaggtgccatcctgtggaagaaccatgaagcactacgaggtggagattcgggatgcaaagacgagggagaagctgtgcttcctggacaaggtagagcctcaggccaccatttctgaaatcaagacccttttcaccaagacacacccgcagtggtatcctgcccgccagtccctccgcctggaccccaaggggaagtccctgaaagatgaagatgtgttgcagaagcttcctgtgggcaccacagctacgctctacttccgggacctcggggcccagatcagctgggtgacggtcttcctgacggagtatgctgggccccttttcatctacctgctcttctacttccgggtgcccttcatttatggccgcaaatacgactttacatccagtcggcatactgtggtgcacctcgcctgcatgtgccactccttccactacatcaagcgcctgctggagactctcttcgtgcaccgattctctcacggaaccatgcccctgcgaaacatcttcaaaaactgcacctactactggggctttgctgcgtggatggcttattacatcaaccaccctctctacacaccccctacctatggagttcagcaggttaagctggcactggccatttttgtgatctgtcagcttgggaacttctctatccacatggctctccgggatcttcgaccagcggggtcgaaaaccaggaagatcccataccccaccaagaaccccttcacctggctgtttctgttggtgtcctgtcccaactacacttacgaggtcggctcctggattggctttgccattatgacacagtgtgtcccagtggccctcttctccctggtgggcttcacccagatgactatctgggccaagggcaagcatcgcagctacctgaaggagttccgtgactacccacccctgcgcatgcccataatccccttcctgctctgagcagctcctcccgagctcagcccagtaatgccctccacctactacccctgtcctgatgtggctggccaaggctctccagcagcaacaataaaacctgcttacccaaaaaaaa

SEQ ID NO: 3981 - DNA, 996 bp, Rattus norvegicus
  Genbank Accession No. NM_138708
atgggcacacagcagaaggacgtcaccatcaagtcagatgcgcctgacaccctgctgctcgagaagcatgctgattatatcgcctcgtacggctcaaagaaagatgattatgaatactgcatgtccgaatacttgagaatgagcggcgtctactggggcctgacagtgatggacctcatggggcagcttcatcggatgaataaagaggagatactggtgtttatcaagtcgtgccagcatgagtgtgggggagtcagtgccagcatcgggcacgacccccaccttctctacacgctcagtgctgtccagattctcactctgtatgatagcatccatgtaatcaacgtagacaaagtggtagcctatgttcagagtctacagaaagaagatggttcctttgctggagacatctggggagaaatcgatacaagattctcattttgtgcagtggcaactttggctctcttgggcaaacttgatgctattaatgtggaaaaggccattgaatttgttttgtcctgtatgaactttgatggtggatttgggtgcagaccaggctctgaatctcacgccggacagatctattgttgcacaggattcctggccataactagtcagttgcatcaagtgaactccgacctacttggttggtggctttgtgaacgacagttgccctctggcggactcaatggaagacccgagaagttaccagatgtgtgctattcctggtgggtgttggcctccttaaagataatcgggaggcttcattggattgacagagaaaagcttcgaagcttcatcttggcatgtcaagatgaagagacaggagggtttgcagacaggccaggagacatggtggatccctttcacaccttgtttggcattgctggattgtcacttctgggggaagagcagatcaagcctgtcagccctgtcttttgcatgcctgaagaagtgctacagagggtgaatgtccagcctgaactagtgagctag

SEQ ID NO: 3982 - DNA, 389 bp, Rattus norvegicus
  Genbank Accession No. NM_138826
tcccgacttcagcagcccgactgccttcttgtcgcttacaccgttgctccagattcaccagatctcggaatggaccccaactgctcctgctccaccggcggctcctgcacctgctccagctcctgcggctgcaagaactgcaaatgcacctcctgcaagaagagctgctgctcctgctgccccgtgggctgctccaaatgtgcccagggctgtgtctgcaaaggtgcctcggacaagtgcacgtgctgtgcctgaagtgacgaacagtgctgctgccctcaggtgtaaataatttccggaccaactcagagtcttgccgtacacctccacccagtttactaaaccccgttttctaccgagcatgtgaataataaaagcctgtttattct

SEQ ID NO: 3983 - DNA, 936 bp, Rattus norvegicus
  Genbank Accession No. NM_138828
atgaaggctctgtgggccctgctgttggtcccattgctgacaggatgcctggccgagggagagctggaggtgacagatcagctcccagggcaaagcgaccaaccctgggagcaggccctgaaccgcttctgggattacctgcgctgggtgcagacgctttctgaccaggtccaggaagagctgcagagctcccaagtcacacaggaactgacggtactgatggaggacactatgactgaagtaaaggcatacaaaaaggagctggaggaacagctgggcccagtggcggaggagacacgggccaggctgactaaagaggtgcaggcggcacaggcccgtctgggagctgacatggaggatctacgcaaccgactcgggcagtaccgcaacgaggtaaacaccatgctgggccagagcacagaggagctgcggtcgcgcctctccacacacctgcgcaagatgcgcaagcgcctgatgcgggatgcggatgatctgcagaagcgcctagcggtgtacaaggccggggcacaggagggcgccgagcgcggtgtgagtgctatccgtgagcgcctggggccactggtggagcagggtcgtcagcgcacagccaacctgcgctggcgccgcccagccccgcgcgatcgcgcccaggctttgagtgaccgcatccgagggcggctggaggaagtgggcaaccaggcccgagaccgcctagaggaggtgcgtgagcagatggaggaggtgcgctccaagatggaggagcagacccagcagatacgcctgcaggccgagatcttccaggcccgcatcaagggctggttcgagccgctagtggaagacatgcagcgccagtgggcaaacctaatggagaagatacaggcctctgtggctaccaactccattgcctccaccacagtgcccctggagaatcaatga

SEQ ID NO: 3984 - DNA, 1830 bp, Rattus norvegicus
  Genbank Accession No. NM_138839
tgcgatccggagaagccggggtctgagcggctcctccagagttactgatctatgaaatggcagagaatggaacaaattgtgaccagagacgtggagcaatgagtaaggaacagcataatgggagtttcacagacccctcttcagtaaatgagaagaagagaagggatcgggaagaaagacagaatatcgtcctgtggagacagccactcattaccttgcagtatttctctctggaaactcttgtagttttgaaggaatggacctcaaaattgtggcatcgtcaaagcatggtggtgtcctttttcctgctgcttgctgcgcttgtagctacgtattatgtggaaggagcgcaccagcagtatgtgcagcggatagagaagcagtttcttttatatgcctactggataggcctggggattctgtcctctgttggtcttggaacaggattgcacacctttctgctttatctgggcccacatatagcttcagttacattagctgcttatgaatgcaattcggttaatttccctgagccaccctatcctgaccagattatctgcccagacgaagaaggcactgaaggagccatatctttgtggagtatcatctcaaaagttagaattgaagcctgcatgtggggcattgggacagcaattggggagctgcctccatatttcatggccagggcagctcgcctctcaggtgctgaaccagatgatgaagagtatcaggaatttgaagaaatgctggaacacgcagagactgcacaagactttgcatcacgagctaaactggcagttcaaaaactagtacagaaagttggattttttggaattttggcctgtgcttctattccaaatcccctgttcgacctggctggaataacatgtggacacttccttgtacctttttggaccttctttggtgcaaccctgattggaaaagcaatcattaaaatgcatatccagaaaatctttgttatagtaactttcagcaaacacatcgtggagcagatggtggctttcattggggctgtacccggcataggtccgtctctgcagaagccttttcaggaatacctggaggcccagcggcagaagctccaccatagaagcgaagcaggcacagcgcagggagaaaactggttatcctggacgtttgagaagctggtcgttgccatggtgtgttactttatcctgtctatcattaactccatggcacaaagctatgccaaacgaatccagcagcgcttgaactcagaggagaagactaaataagcagagagtttttatctgcagaagttagcgtggtggagcctgccttacatcgggagggctctcaccaggaaggaagatccccatttccaacctgtactgatttttaaaacatttctccctgaaagcagtttagtccacattttacactgacatacttttgctttctttgttaaggtaaggtctccaccctcgattcaatccacattgtattccttagggtggatatgatgttctgctgcaaacttaacaaaactggccttctgacactttcacagggccacatggtccaactggagaacctcggccacacagaaccttctgacgtatgttaaatatgccaggcttttcaggcttgtcacaaatgattggtttttctaagtcaccaaatgtatataagttatatatgttggatagcagtcttgcatgcctatcatggaacaatgtaatatgccttcctttcccaccctcaaaaaggccattttatgatgcattgcacaccctctggggaaattgatctttaaattttgagacagtataaggaaaacctggcccg

SEQ ID NO: 3985 - DNA, 3874 bp, Rattus norvegicus
  Genbank Accession No. NM_138871
cggcgtcggtttcccctcttacacgcggaactcgaagtgggcggccgtggccgcagtgcttgcgtctgcgcagagctgagccggccggctaaggggcggggcgtggtgcgacagggcgtggcctagaaggcggggctttaggtgattcccaagccgcggctcaggccgtgctggggaaaccgaaagtgggcggcggccgcgtcgggggccctggcggaggtggcggagggagccgggcccagaggcgcgggcgtgggccgcgggcccccgggacgaggcaaagatgctggaggcagatctggtctccaagatgctacgggctgtcctgcagtctcataagaacgggatagtactgccccggctccaaggagagtaccgctctttgactggagactggatccccttcaaacagctgggctacccaactctggaagcgtatctgaggagcgtgccagcggttgtcaggatagaggctagtagatctggagagattgtctgctatgctgtagcctgcacagagactgcgaggattgctcagcttgtggctcgtcagaggacctctaaaaggaaaacagggcgacaaattaattgtcagatgagagtgaagaaaaccatgccattctttctagaagggaaacccaaggcaaccctcagacaaccaggatttgcttcagactattctatcagcaagaaacccaatccaacgctgttaagagaaaaaggaagcaccttgggagctaaggctgatgtggacatgccaccttacccagacgctccagtgcagaggcacgtgagcatgtctgccaacagcagtgttacggttttaagaagtcacccagaggccagcaagctacaatttatgggctacagtccaaaacctcactgtctgcttttgttcagtccaaagtcatccctgccagcacctttccagacacacatctcacgggcctgccctaaggaagtgaatgataatttaaatcagactgttgagaaaccaaatgtcacgcctcctgcctcttacactaataagatggatgaggttcaaaaccgcataaaggaaatattagacaagcataacaatggcatttggatctctaagcttccacatttttacaaagagttttataaagaagaccttaaccaaggagttttacagcagtttgaacactggcctcacatttgcacggtggaaaaaccttgtggtggtggtcaagatttacttctttatcctgccaagagagagcagcccttgagaagtgaccaggaccccgagaaggagcgcccacctccaccacctgctcccaggcaggaggtgccatcaaaggggagcccagcagtgatgccggatgtcaaagagaaagtggccgagctgctggggaaatactcaagcggcctttgggcaagtgcactccctaaagcatttgaggacatgtacaaagtcaagttccctgaggatgccttaaaaaatcttgcctcactctctgatgtgtgcaccataaactacatttctggaaatacccagaaggcaattctctatgcaaaactcccattgcccacagacaagatcttaaaggatgaagcgcaggcacaaggagattttgacatcaagtcaatgattgaacaagagtatttgcagatagaaaaaaacatggctgagagtgctgatgactttgtggaggacataactgtgccgcctctggtaattcctaccgaggcttcaccgtctgtgttggtggtggagctgagcaacacaaatgatgtggttatcaggtatgtaggcaaagactactcggctgcccaggagctcatggaagacgagatgaaggagtattacagtaggaaccccagagtcacaccaatccagaccgtgcacgtggggcagctgctggcagtcaatgcagaggaggatgcctggttacgagcacagatcatctccacggacgagaacaagataaaggtgtgctatgttgactatggcttttgtgaaaacattgagaagagtaaagcataccgactgaacccacggttctgctctctgtcctttcaagctacaaagtgcaaactagcagggctggagattctgaatgatgatcccaacctcgtgaaggtggtggagtcattaacgtgcgggaagatctttgctgtggagatactggacaagtcagatatcccactggttgtgctgtatgacacttcaggagaggatgacatcaacatcaatgccacctgcctgaaggccatatgtgacagatctctagaagttcatctccaggtggacgccatgtacacaaatgtcaaagtgactaacatttgctctgatggaacactctactgccaggtgccatgcaagggtctgaacaaactcaatgaccttctgcataagacggaggactacttccactgcaagcacatgacctctgagtacttcatctcgctacccttctgtgggaagatctgcctcttccattgcaaagggaaatggttacgagtggagatcacaaatgttcacagcagccgagccctcgacgttcagttcctggactctggcaattcgacatccgtgaaagtgtcggaactcagagaaattccaccacggttcctgcaggaaatgcttgccatcccccctcaggctatcaagtgctgtttggctgatcttccacagtccattggcatgtggacaccagacgctgttctttggctaagagattctgttttgaattgctcggactgtagtattaaggttacgaaagtggacgaggccaggggcgtggcctacgtgtatttattcacccccaagaacttcccggatccccaccgcagcatcaaccggcagatcacaaacgcagacctgtggaagcaccagaaggatgtgtttctgagcgctgtgtctgctgcagccagctctcccggcaacaggaatgccagcacacctgctccaggcagccctgcggagagcctcagaaagagccacccggaggtcctcagaaagtctgttctggaccacaccagctctttctccttggaggaactgccccctcctgtccacctgtcaaagtcaggggaacacatggatgtgtatgtgcctgtggcctgtcacccaggccatttcgtcatccagccttggcaggagatccacaagctggaggtgctgatggaagagatgatcctgtactacagcgtgtctgaggagcgccacatagcggtggagagagaccaagtgtatgcagccaaagtggagaacaagtggtacagggtgctgttaaaaggaatcctgacaaatgggctggtgtctgtgtacgagctggactatggcaaacatgagctagtcaacataaggaaggtgcagcccctagtggacgtgttccggaagctgccattccaggcagtcactgctcaacttgcaggagtgaagtgcagccaatggtcggaagaggcttcaatggtgtttcgaaatcacgtggagaagaaacccctggtggcactggtgcagacagttattgaacatgctaacccttgggaccggaaagtagtggtctatctagtagacacatcgctgccagacactgacacctggattcatgactttatgtcacagtatctggtagagctttcaaaagctaattaatcactgcttgagaccttgaccgttaatgcagattgttctctaagcaataatacaaaatgtgtagtagggtcttaaaacatcttatttttactacatggctctgactgttgtggaggattgaaaagaatatgctttgtttgatgaaagatatttaacaagttttgtttaacgcagttgacttttcaaagaaaaattgcacttgaattattaatataatattagaataaaatgtttaagcaatgtaaaaaa

SEQ ID NO: 3986 - DNA, 1893 bp, Rattus norvegicus
  Genbank Accession No. NM_138877
gggtgtagaacggtgccaccactgtcttcttcgccaccatgggggcccagctgagcacgttgagccgagtggtactctccccggtctggttcgtctacagcctcttcatgaagctgtttcagcgctcctcaccggccatcaccctcgagaaccccgacatcaagtaccctctgcggctcatcgacaaggagattatcagccacgacactcggcgcttccgatttgcactcccttcgccccagcacatcctgggccttcctatcggccagcacatctacctctccaccaggatcgatggcaacttggtcattcgtccctacacccctgtgtctagtgatgatgacaagggctttgtggacttggtggtcaaggtttacttcaaggacacgcatcccaagtttccagctggagggaaaatgtctcagtacctggaaaacatgaatattggagacaccattgaattccggggccccaatgggctactggtctaccagggcaaagggaagttcgccatccgtgcagacaagaagtccaaccctgttgtcaggacggtgaagtctgtaggcatgattgcaggagggacaggcatcaccccaatgctgcaggtgatccgagccgtcttgaaggacccgaacgaccacactgtgtgctatctgctcttcgccaaccagtccgagaaagacatcctgctgcggcctgagctggaggaactgaggaacgaacattcttctcgcttcaagctctggtacacagtggacaaagcccccgatgcctgggactatagccaaggcttcgtgaatgaggagatgatcagggaccatcttccacctcctggggaggagacactgatactgatgtgtggacccccaccgatgatccagtttgcctgtttgccaaacctggagcgtgtgggccatcccaaggagcgatgcttcaccttctgatggctggatgctggccactcccatgcctgctgctcacgcactcaccacaaccaccttccaccccttccttccccactactgtcctttaccctgacatatgcccacatccatgctggggcctgggttcagcctggcctgcccagccctggtcatccagctgtactggcccctgaggggcccctttgggagcaggcctgtgtatcaggtggcttctgttgaccactttctgaataggcttctgtctggtactaactggccattaccagagatggtccatgaccacccctttatacacacacacatacacatacagagacagagagacagagagacagagatagacagagatagacagagagacagatacagacatagagacagacagagacagagagagaggagtcagagagctgttagtaccatgtctacccgttaccatggaccgcaatgtgtagtaaggaaatgaaaggtaaacagttatctacagtcctaggaaccatgcctgtcacctaaccacctactgccttaggctatggcctggtctgtgcccctaaacactacattagacagtgacacccagaggttctcttaggagggtgtctggcagtgacaggccagcccccacttgctggccaggagttccttgggtcagcacgtggacccttccaaaaccccacacactgcccctcccctccatgatgccttgagcaccctaagttgtcagcccaacagagtttggtagaccttggggtacctggcttgtttctccatcccatacctccctcccatctggttcccagcctggggggttctgagcagagcctcttttctcggagacagacccggtgcctggcgctgccttcagcagacagcagacagcctcctgcacactggctttttttagtcatttatgggcaaaatgagttaaaataaaactttgcaaatcctg

SEQ ID NO: 3987 - DNA, 3628 bp, Rattus norvegicus
  Genbank Accession No. NM_138881
tggggatgctagtgcctactgcgctggctgctcggctgctgagcctgttccagcaacagctgggttccctctggagtggcctggccatgctgttctgctggctgagaatagcattggggtggccagatcctggaaagggacagccacgggtccggggtgagcccaaggagactcaggagacccacgaagatccaggcagtgctcagcccacaacccccgttagtgtcaactaccacttcacgcgtcagtgcaactacaaatgtggcttctgcttccacacggccaagacatccttcgtgctgcccctggaggaggccaagcgaggactgcttctgctcaaacaggctggtatggagaagatcaacttttcaggaggagaacccttcctacaggacaggggtgaatacttgggcaagctcgtgagattctgcaaggaggagctagccctgccctctgtgagcatagtgagcaatggcagccttatccgagagagatggttcaaggactatggagactatttggacattcttgctatctcctgtgacagctttgatgagcaggttaatgttctcattggtcgtggccaagggaaaaagaaccatgtggaaaaccttcaaaagctgcggaagtggtgcagggattacaaggtggctttcaagatcaattccgtcattaatcgcttcaacgtggacgaagatatgaatgagcacatcaaggcgctgagccctgtccgctggaaggttttccaatgcctcctgattgagggtgagaactcaggagaagatgccctgagggaagcagaaagatttcttataagcaatgaagaatttgaagcattcttacagcgtcacaaagatgtgtcctgcttggtgcctgaatctaaccagaagatgaaagactcctaccttatcctggatgaatatatgcgctttttgaactgtaccggtggccggaaggacccttccaggtccatcctggatgttggcgtggaggaagcgatcaaattcagtgggtttgatgagaagatgtttctgaagcgcggggggaagtatgtatggagtaaggctgacctgaagctagactggtgaggtgagattggacggagactctaaccagctacgaggagtccacgagcagccgctcgccaccacgcacatctggctgtctacggactgttgctactgagaatgcactctatgttctttctttcagtttgactgaactaagaaaggagtaaaaccattctgtgaacccttatacagccgataagggtcctccacaggggaaggagttcagttcacagaggaacaaggtccagcgatctcaaagaactcacattttatttgtattcgaatttttgtatggatcgttactgtgaatcccatgtttccttttccctttctgttcccccatgagaaactgggttattttctgctaactatgccagttttgtcaacaggaaggatcacaaaacacaccctgcgattactgctgactgttctaatgcttttctgctttggaatctcggactttttgctcagaaatatagaatcaagaagtgtgttatagagccgtacgtgagaaccttactcttttgcaaggagcatatggaaggaggtacttctgaggacggtgtgttcatggcctcagcctctgctgctgctgctgcttcaaggatggctgttctatatcgtaccaattccttcaaggttctggacaaagccaaggtacactttacctttcatggcatggccgtgaagatggcactgacagccgcaaccaccccagcactgaggctgcctgagtctgtcaggctaaaaggttgtcccacttttctgaaaagctacaagggctcttctgcacatccagcagaatcatgacaggatgggcatggaggactcttcaggagtatgaaatgtggctgctgctccttaccatatttctcatgaaactctgaaataagacctagtagtctaggtcaccatgagaaaataatttcttctctacatcaaataagcaaaagagagaacatgaactagcccaaatcttcttcctgtggaagcattgcatgagtttattcaacctagacagcctcactgcttggaaaataattccctggaaattaaataaataccatggaaaagaaattaaactcctctgcaatcccactgtggccactagagggcaccaggaagtcagacttcattgtctcagagacttttcttcagtctttttttagaatttggtgaattttaattctgttccttatctgttttgtctttgttttttgttttggtgcctattactaaaattaatactaaacattttccaaggaactggaattttggccatttacaaaaggtcttcattctttagtgaggtcactataattcaactaagacatactctgtctcattaaaaataggtcaggttttcctgtgttttctgtcttgtttggttgtgtgtgtgtgtttacctatttttgcttgaatatagatataactatgtatcccaggctagcctggaactcatgatacctctgccttaacctccccctcttaagtgcccaggaattacccaactcctgtacagagatttttaagagaagtttgagtcacattcccccctgcagattgtgatttttttttttaagttaagtcctgtgtacatagttcacatgggaaaccatgacatcccagaggacatgggcagacacccacttggtcacacgacagagggaagctgcatgtttctttccctaattaaagtagagcatgaagaaagtatgattggaaagtgagccatcatttacatgtacccccaaccccttgtgcatgcactggcggtgggagatctctgtgcttaaaatattgaaaagtcccctttccttaaagggaaaaattacgatattttactatcgtagtacaaatcaaacttggattagatcatacattggtttgctttttcagtgttaaatktgggtgttcattttgtaaagcatacgctccctgctggggaaacaaggagtgatctagttgacatttgttaagtgtgaccagcagataccttgtgtcccatgattgatttatgcagagcagtaatactgggaagggggatttacttaagaacatcgacgggtaggacatccaacactgatttcaaagttttggcttctttattataatgtgttcggcggtaaaaaaaagtcatgggttgttttctttgaagctgaaagtctcatggtgttatttacctaaattatctgaaaaatttaaaaggggcccaggtttcattctgcgttggagtttgggggtctaattgttgcataaataaacaggcaaccaatcatcagaggttgactcctcccatcaataattcagctcgtgttttacccttttgatggactgatgttgtttcataagctattagtagtccaagaacaatcatgcaggcctcatgtgaatgtgttcagatgaggtttgatgttcgggatacatgtgcatgtatctccctgtagaatgacactgtattttgaggcattgctctagtgtatggaaacgtgatctgtgtattaaaatgttttatgcatgacctcaaaaaaaaaaaaaaaaaaaaaaaaaaaaaaaga

SEQ ID NO: 3988 - DNA, 707 bp, Rattus norvegicus
  Genbank Accession No. NM_138883
aaagatggccgcaccagcaacatccgtgctgtcccgacaggtgcggagtttcagcacatctgtggtcaggcccttttcgaagcttgtaaggccccctgtccaggtctacggcatcgaaggccgctatgcaaccgccctgtactctgctgcgtctaagcagaaaaggctggaccaggtggaaaaggagttgctgcgagtggggcaactcttgaaggaccccaaggtgtcccttgctgttctgaacccctacattaagcgctccatcaaagtgaaaagcctgaaggacatcactacaaaggaaaaattctctccgctgacggccaacctcatgaatttacttgctgaaaatggtcgcctaggcaacacccagggcgtcatctctgccttctccaccatcatgagtgtccaccgtggagaagtgccgtgcacagtgaccacagcgtttcctttagatgaagctgttctctctgagttaaagacagtgctgaatagcttcctgagtaaaggccagatactgaacctggaggtcaagactgacccatcaatcatgggtgggatgattgtccgaattggagagaaatacgttgatatgtctgcaaagagcaagattcagaagctcagcaaggccatgcgggatctgctctgagagactgtcacctgtgtgagcgcttgtctttggagcacaataaaatgcttcctgaacagag

SEQ ID NO: 3989 - DNA, 3189 bp, Rattus norvegicus
  Genbank Accession No. NM_138884
ttcagaatcactacttgaagcttcagatcccttctctacaatgaacctcagcactgcaaaccaccacatacccctaaatgatggtaacagcattccgatcatcgggcttggaacctactcagaccctagaccggtacctggcaagacctttatagcagtgaagacagctattgacgaggggtaccggcatattgatggggcctacgtctaccgaaatgaacatgaagtcggtgaggccatcagagaaaaggtggcagaagggaaggtaaagagggaagagattttctactgtggaaagttatggagtacagaccatgatccagagatggtccgcccagccctggaaaggaccctgcagaccctcaagctagattacatagacctttatatcattgagatgcccatggcctttaagcctggagaggaattttatcctaaagatgagaatggccgagtgatataccacaaatcaaatctgtgtgccacgtgggaggcactggaagcttgcaaagacgctggcttggtgaaatcccttggggtgtctaattttaaccgcaggcagctggaggtcatcttgaacaagccaggactcaagtacaagcctgtcaccaaccaggtggagtgccacccgtatttcacccagacaaaactccttgaagtttctgccagcagcatgacatcgttcattgtcgcatacagccccttagggacctgtcgcaacccgttatgggtgaatgtatcttctccacccttgttaaaggatgaactcctaacctcgctggggaaaaagtacaataagacacaagctcaaattgtgttgcgtttcgacatccagcgagggttggttgtcatccctaaaagtactacccctgaaaggatcaaagaaaactttcagatctttgacttctctctcaccaaagaagaaatgaaggacattgaagccttgaataaaaacgtgcgctttgtggagatgctcatgtggagtgatcatcctgaatacccatttcatgacgaatactgaacatggaaatttcttcagtggagttttttttttgtctttcattcgggatcttgagctgattaatcccctccagtcgtagaaataaatggggtcttgctatcttcagattaagttgagcagaatacaccatgcttaacttgtgtatagtattaattcaacttagctctgatgaagagaagatttaaatatatctaaatagtttgttggaaaatgctttactagtatctttagctcaatgtgttctagattgttgatggaaattaccgaactttaattcaaaaataacaaaatatataaaatacaagatacaatataaaatataaaatacaaaaatataaaaacaggttctaacccaggagtctgagactaccatagggagtttgatttgtttagcatttagcaggacaacaaaagaggttggcatgcttccaggtgctgaccataaccatgacccaaacaaggtcatggacacaagatggacacagccaagacacaaatccacataccaatattaatgcaccttgagtatagacagaactgaaagtctagaaagtctaaagaagaacataaagcaggatgtcccggggctagaggttctcactggaggacttgcctggcagactggagacccagggtgagggtgtgggtgaggactatcagcaaagccataacgattctgtttttaccctttgtttccatccagtgtgcccattcagcttttaatgtgcttgaaggacagacagttaccgattccttcttaaattgtttttgttcagggcagtggggaattgagacagggtctcaggtagtctgctcatgtagctgcttacaaacttgctgtgcagctgagaccagttttgaattctgaacccctggtctctcttccatttttcatggcctgagcttccacctgactggtaagtccccacttgtactgtgctgtaatcattcttgcccacttcatcaaggaaaccaccatgtaaagtggcaagaaacaatcaatatatacaaccaagatttgtatacaatatggtctgaagatggtgatttttaaaagaatgatatttaaatagccatttctttctttctttctgaatctttaaaaattattttatttatgtgcattggtgttagctgcatgtgtatctatgaggaattgtttgaactcatggaactggagttacagacagtggtgagctgtaggtaggtgctgggaattgaacccaagtcattgggaagagctgcaagtgctcttaactgctgagccatctccccagcccccaaatgaatttgggaaatactagaagataaagctttgtaaagtagtttttaagatcttaagaatatttgaggtacgtatctgaattttgacaaagctgcaagttcttttttttaaattggatttttaaaaatttatttacatttcaaatgttatcccctctcctgggttcccatccacagacctccctatctcatcccccctctcccttcttctatgagagtgttcacccacctacccactccttccctcctccctgccctgacattcccctacactagggggtcgagtcttggcaggaccaagggcctctcctcccattggtgcccaacaaggccatcctctgctacataggcagctggagccatgggtctgtccatgtgtctctctggatggtggtttagtccctgggagctctggttggttggttctgttgttatggggttgcaaacccttcagctcctttaatcctttctctaattcctccattggggaccctgttctcagttctatggttggctgtgagcatccacctgtgtatttgtcatgctctggcagagcctctcaggagaatcaggctcctgtcagcagagcacaagtaattttagcgtatataaatttttaaaaagtgataaatgattacaactgtatctatttttaattcatctgaaatacagtacatttgtttatattagatcacttccaaagggtgagagatctctaatatatttaattcatagagaatcaatggccgaagagaataagttttgagaattatcacttaaaaatgtgatcaacatgaaccatttttgttcaatactgttcaatattgttaacaatgctgttctctggaaaatattttattcacatgaattaataaaatataatg

SEQ ID NO: 3990 - DNA, 10170 bp, Rattus norvegicus
  Genbank Accession No. NM_138885
ggcgcgtcggtggtggcgctgcgcttgggttacccgagctgacgtggcttagattgggcggggggcgtccggagttgtctgggacggccacctacagtgcttgaagaggtcagaaaaggacatcagatcctctaggactagagttacggacagttgtgagcagccacgtggatactgagaggcgaaccctaggccctctggaagagcagctggtgctcttaacctctgaccaactctgcagaccccactgtgagtcatttttctccgtgcccatggagcgctccttcagagatgctgagccgattatcgggattagcaaataatgttttgcatgaattatcaggagattacactggctggactacaatgacttcctcggaagctgaattaccccagggttctgccatggaattgaataatagtacccaaaaggacgttctggatcgcctggctgatgcagagaagttagtgctggagctaaaggatatcatcagtaagcaggatgctcagctccagcaaaaggacgaagctctgcaggaagaaaaaaaaggagctgaaagcaaaattaaaaaaataaaacttcatgcaaaggccaagatcacgtccttgaacaaacaaatagaagaattgaagacacaaggaggagctgcctcgcctccagaagtgcaggcagaggagctctccaagcatgataagagttcaacagaagaggagatggaggtagaaaaaataaaacatgaactccaggagaaggagaaattaattagcaatttgcaagcccagctggaccaggcgcagtcagaacaagcctcccagttggataagagttctgcggagatggaggacttcatcctgatgaggcagaagctccaagagaaggaggaactcatcggcgctttgcaaacgcagctcagccagacacaggcagagcaagctgcccagaaattgagggtgatgcagaggaagcttgaggaacacgaagaagccttgctgggccgagctcaggttgtggacctgctacagaaggagctgacttctgcagaacagaggaaccaggatctttcacagcagttgcagctgttggaggctgaacacagtactttaaggaataccatggaagcagaaagacaggagtccaagatcctgatggaaaaggtagaactcgaaatggcagagaggaaggaagagctgtatcagcttcagggacagttggagcgagcaggccaagcccaggctgagctggagatgcagtacggtactctccagcaaagacatgagacagaaatggaggagaagacagcttgcatttcgcttcttcagaagaacgagcaggagctgcagtctgcctgtgacgctctgaaggaggaaaactccaagctgcttcaggagcagcaggaacaggctgccaagtcagcccaggccctgcagcagctggaagatgaactccagcaaaaatctaaagaaattagccaatttgtaaacaaaccaaacttggaaaaacatgagacatcatctcagacgtctttaccagatgtttataatgagggcgtacaggcagtcatggaggagagtgtcgcctctttacagaagagagtactagagctagagaatgagaagggagccttgctccttagttctctagagctggaggagctgagagctgagaacgaaaaactctgttctcggattactcttctggaggctcagaatagagcaggagaggctgatggtatggtctgtgaggtcagcacagctggtattgctttgctcaacaggagcgactcttctactgaagaaagtggacaggatgtcctagagaacacattttctcagaaacataaagagctgtcggttttattagtggaaatgaaggaagcccaggaggaaattgcatttcttaagtcgcagctgcagggcaaaaggcctgaaggggactatgaggtccttgatcggaaagaagtacagatgatggagagtgaaggactgccctcagttacagcacgagatgtcctctgtgcgccccgtgacaagaacagtgtcccagcagtggaaggggaacaggcaggcatgagagatcagcacggaacattggaggcgggacctctaaatgacaccggaatggaactgaactccccacagccggacggtgtggacaaatccctctctgcaccacatgtctgtctgtgtcaccagggtgaactggaaaggctgaaaactcaagttttggagcttgagacaagccttcatacagccaaggaaactcatgagaagaatttaagtgagaaagcgaaggaaattagcagcctaacccagcttaccaaggagttcaaagagagtgcggaggaagcccgcagcacgctcactgctgtgtgtgaagaaagagaccagctgctttaccgggtgaaggagcttgatgtccttggagaactccgggctcaggtccgagaactggaaaccagccttgcagaagcagagaagcaaagaggtctggactatgaaagtcagagggctcagcacaacctgctcaccgagcagatccacagcctaagcatagaagccaaatctaaagatgtgaaaatcgagactttacaaagagagctggatggtgtgcaactacaattttctgaacagggaacacagataaaaagcctacagagccaactgcagacgaaggaaagtgaagtgctagagggggcagagcgtatgaaggacatctcaaaagaaatggaagaactgtcgcaggcgctttcacagaaggagctggaaatagcccaaatggaccaactcttgttagagaaaaagaaagatgtggagacactccagcaaaccatccaggagaaggatcagcaagtgactgaactcagcttcagtatgacagagaaaatggttcagcttaatgaagagaagttttctcttggggtagaaattaagactctgaaggagcagctcagtttattgtccagagctgaaggagcaaagagagagcaggtagaagacagtggagctgagtccagccctaaacatggtccacatgagtcgagcgcagaggagccagtgtgtaaagaggcactacagcaagaacttgagtggctgaggaaagagagtgagcagaggaagcggaaactgcaggcagcgctgatcagcagaaaggagctactgcagaaagtcagcaagctggaggaggagttagccaaggtgagagaggagtccacaaaagactccctcagggagagtgagaagagagagctggaggaagacagcaagaacaaagatgacccagaaaagtatgggacttctgagtggagagaactagaggtttctttaagactgacaatatctgaaaaggaagtggaactggagggcataaggagggacttaaaagaaaaggcagcagcagaagaagagttacaggccttggtccaacggatgactcaggacctgcagaataagacaaagcagatagacttgcttcaagaagagatcactgaaaaccaagcaactattcagaaattcatcacaggcaccatggatgctggggatggagactcagcagtaaaggaaacctcggtgagcagcccaccccgtgcagggggtggggagcactggaagccggagctggagggaaagatagtagacctggaaaaagaaaagactcaacttcaaaagaagcttcaagaagccttaatttcccgtaaggcaattctaaaaaaggcacaagagaaagagaaacatctgaaggaagagctcaaggagcagaaggatgcttaccgtcacctacaggaacagtttgatgggcagagtaaggaaaatgagaacattcgggccccgctaaggcaactccaagcaaaggagtctacagaccagcagctcccaggcactggccagcaggagcccactcacggttcagaaggcctttcactcgaaggcacagagcctgcttcagagtctgacttacacgcagctcagccttcgcaccctggagagacagcaactctccaggctaccgtttctgttgcccagattcaggaccagctgaaagaaattgaggttgagaaagaagagctggaattgaaaattagttctacaacaagtgagctgaccaaaaaatctgaagaagtattactactacaagaacagatcaatgaacagggcttagaaatccagaatttgaaggcagcgtcccacgaagccaaggcccacacagaacagctgaagcaagaattggaaagcagccaattgaaaattgctgacctggaacatctgaaaacattacagcctgaactagaaacactgcaaaagcacgtgggccagaaggaagaagaggtcagctaccttgttggacagcttggtgagaaggagcagaccctcaccaccgtacagacagaaatggaggagcaggagcgtttaatcaaggccctgcacacacagctggaaatgcaagccaaggagcatgaggagaggctaaagcaggtccaggtggaaatttgtgagctaaagaagcagccaaaagagcttgaggaagaaagtaaggcaaaacagcaattacagaggaaactgcaggctgccctcatctcccggaaggaggccctcaaggaaaacaagagtctgcaggagcagttgtcctcggccagagatgctgttgaacatctgaccaaatctctggcagatgtagagagccaggtttctgttcagaatcaagagaaagatgcactcctaggaaagttagcccttcttcaggaagaaagggacaaactcattgtagaaatggacaagtctttactggaaaatcagagccttggtggctcttgtgaaagcctgaagctagctctcgggggcctcactgaagacaaggaaaagctgatgaaggagctggaatccgtgagatgttctaagattgcagagagcaccgaatggcaagagaagcacaaggagctacagaaagagtatgaagttcttctgcagtcctacgagaatgtgagcaatgaggcagagaggattcaacacgtggtggagagcgtgaggcaagagaagcaggaggtgtacgcaaagttaaggagcgcagagtcagacaagagagagagagagaagcagctgcaggatgcagaacaggaaatggaggagatgaaggagaagatgagaaagtttgccaaatctaagcagcagaagatccttgagctagaggaagaaaacgaccgacttagagcagaggcccagcctgtaggaggagccaatgaaagcatggaagctcttctttcttccaatgccagcttaaaggaggaactagaaaggatcacattggagtataaaaccctttctaaggaatttgaggctttaatggcagagaagaacactctgagtgaagagactcgtaatctgaagcttcaggtagaagctcaggaactgaaacaagctagcctcgagaccaccgagaagtctgatgagccaaaggatgtcatcgaagaggtaacagaagccgtggtaggcaagtctcaagaacaagattccctgagtgaaaatgccaagcttgaagatgcagaagctactctcttggctaacagtgccaagcctggtgtcagtgagactttcagctcacacgatgacatcaataactacctccagcagcttgatcagcttaaaggaagaattgctgagttagagatggagaaacagaaagacagggagcttagccagactttggaaaatgaaaaaaatgccctactgactcagatatctgcaaaggatagtgagctcaagctcctggaggaagaggttgccaaaataaacatgctgaatcagcaaatccaagaggagctctccagagtcaccaagctgaaagagacagcagaggaggagaaagatgacttagaagagaggctgatgaatcaactggcggaacttaatgggagcatcgggaattattaccaggatgttacagacgcccaaataaagaacgagcaactagagtcagaaatgcagaaccttaaaagatgtgtgagtgaattagaagaagaaaagcagcagctggtcaaggaaaaaaccaaggtggagtcagaaatacgaaaagagtacatggaaaagatacaaggtgcccagaagggacctggcagtaaaatccacgccaaagagctacaggagctgctcaaggaaaaacagcaagaagtgaagcaactgcagaaggactgcatccggtacctcggcaggatcagtgccctggagaagaccgtcaaggccctcgagtttgttcacactgaatcccaaaaggatttggatgcaaccaaaggaaatctggctcaggccgttgaacaccacaagaaggcacaggccgagttatccagcttcaagatactgctagatgacacccaaagcgaagcagcaagagtgctagcggacaacctcaagttgaaaaaggagcttcagtcaaacaaagagtccatcaaaagccagataaaacaaaaagacgaagacctcttgcgaagactggagcaagcagaagagaaacaccgaaaagagaagaagaacatgcaagagaagctggatgctttgcacagagaaaaagcccatgtggaagacacgcttgccgagattcaagtcagtctgaccaggaaagacaaggacatgaaggagctgcagcaaagcctggacagcaccttggcccagcttgcggccttcactaagagcatgtcgtccctccaggatgaccgggacagggtgatcgatgaagccaagaaatgggagcagaggttcggtgatgccattcagaccaaagaggaggaggtcagactcaaagaggagaactgcactgctctaaaggatcagctccgacaaatgaccatccacatggaggaactgaagatcaccgtgtccaggcttgaacatgacaaggaaatttgggagtccaaggcccagaccgagctccagcatcaacagaaggcttatgataagctgcaagaagaaaataaagaacttatgtcacagttagaagaagctggacagctgtaccatgattctaagaatgaattaactaagttggaatcagaacttaagagtctcaaagaccaatcaactgacttaaagaactctttagaaaaatgcagagaacacgaaaacaacttggaagggatcatcaagcagcaagaagctgacatccagaattgtaagttcaattgtgaacaactagagactgacctgacagcctccagagagctaaccactcggctgcatgatgaaatcaatgtgaaggaacagaagattataagcctgctttctggcaaggaagaggcgatccaagtagctatcgcagaactgcaccaacagcacagtaaagagatcaaagaattagaaaacctgttgtcccaggaggaagaggagaatttgaccttagaagaggaaaacaaaagggctgttgagaaaaccaaccagctcacagaagcactagaaaccatcaagaaggagagccttgagcagaaggctcagttggattcctttgttaagtccatgtcctctcttcaggacgaccgggaccgcatagtaagtgactaccgacagctggaagagcggcacctttctgtgatcttggaaaaggacgagctcatccaagatgctgctgctgagaataataaactgaaggaggagattcgagggctgcgaggtcacatggatgacctcaactctgagaatgccaagctggatgctgaactgatccagtataggcgggacctgaatgaagtgatcaccataaaggactcgcagcaaaggcagctccttgaggctcagctgcagcagaacaaagagctgagaaatgagtgtgtaaagctagaaggaaggctgaaggggtcagaggcagagaagcagagcctgcagatgtccttggacgccctccaggaggagaatcaaggtttgtctaaagagatcaaaagcttcaaggagcagttgacggccttgcacgaggaaggtgccctagctgtctaccatgcccaactgagagtaagagaggaagaagttcagaagttaactgcggctctctcctcctctcagaagagaactgtggatctgcaagaggagttggtttgtgtccagaaggaggcaagcaagaaggtgagtgagattgaagataagctgaagagggagctgaagcatctccatcacaacgcagggataatgcggaacgaaacagagacagcagaagagagggtggcagagctggccagagacctcgtcgagatggaacagaagttgcttacggtaaccaaagagaataaggatcttacggcacagattcaggccttcggaaagtcgatgagttccttgcaggacagcagagatcatgccactgaggagctgagtgacctgaagaagaagtatgatgccagtctgaaagagctggctcagctgaaagggcggcaggacttaggcagagagagtgacgttctttcccaggctgcctttcccctgaccacctctgaaaacatctcgtcccgccttgagaaactgaaccagcagctcatatccaaagacgagcaattgcttcacttatcttcagaactagaaagttctcacaaccaagtgcagtccttcaccaaggccatgaccagcctacagaatgagagagatcacctgtggaatgagctggagaaattccggaagtcggaggaagggaagcagaggtctgcagccccttcagctgcctccagcccagcagaagtacagagcttgaaaaaagccatgtcttcactccagaatgacagagatcgattgctgaaggaactgaagaatctacaacagcagtacttacagatgaaccaagagatcaccgagctccgtccgctgaaggctcagcttcaggaatctcaagatcagaccaaagccctgcagatgatgaaggaggagctcaggcaggaaaacctctcctggcagcacgagctcgatcagctcagagtggagaagaactcttgggagctgcatgagagaagaatgaaggaacagtaccttatggccatctcagataaagatcagcagcttggccacctgcagaatctcctgagggaactgaggtcttcctcccagactcagattctccccacacagtaccagcgacaggcgtcctcagggacatcagctgccctcgacgggtcacaaaacctagtttatgaaacagactgtctcaggacccagctcaatgacagcttaaaggaaatccatcagaaggagctaagaattcagcaactgaacagcaagttctctcagctgcttgaggagaagaacatcctctccacccagctcagggacgccaaccagagtctccgtgacagccagcatcactacagtaacctcttcaaccactgtgccatcctggagaggcaggtgcagcagctgcaggctacggggccactaaatgcagatgttgctccaggagcaccccaggaaaaggatgggattcacataaagactgaaactgagaccacaggggaggaacagccaagcttttctgaagtccagcagcagctgtgcaacactaaacacgatctgagcgagctaaagaagctgctggaagaagagcgagaccaaagactgaccgccgaaaatgcactctccctggccaaggagcagatcagacggttggagcatagcgagtgggagtcagcccggaccccaatcattggcgcctgtggctctcaggagcaggtgctgttgatggatctcccaggcagtagctgtcggaggacccggagcagtgctggatggaagcgggttctgcgttctctctgccgttcccggacccgcgtgccactgctcgcagccatctacttcctaatgattcatgttttactggttctgtgtttcacgggtcacctataaacttgttacttgacaactctcgcacttgtaattccttatctgtagtgtcaggattgttgatcccagggcggcctctcgctttgagcccaccctcttggaaagtgcctgtgaaaagaggtggctgtgaggacaggcggcggtaagctggcctgccacatccgctctccttaaacacgtcggcttctgagatgtgccgtgttcactgcttcttcagatgatgcagatccacatcccgtgtggccttgcaggatgctgagagaggctttctagccgtgccaacaagatggttccaataaacacagtaatctggaatcc

SEQ ID NO: 3991 - DNA, 1115 bp, Rattus norvegicus
  Genbank Accession No. NM_138895
ctgtgagggtgtttcgacgcgctgggcggtttgttccttcatcgcattcgttaacaggtcaaaatgcaaatcttcgtgaagaccctgaccggcaagaccatcaccctagaggtggagcccagtgacaccatcgagaacgtgaaggccaagatccaggataaagagggcatcccccctgaccagcagaggctcatctttgccggcaagcagctggaagatggccgcaccctctctgactacaacatccagaaagagtcaaccctgcacctggtcctccgcctgaggggcggcatgcagatcttcgtgaagaccctgaccggcaagaccatcaccctggaggtggagcccagtgacaccatcgagaacgtgaaggccaagatccaggataaagagggcatcccccctgaccagcagaggctcatctttgccggcaagcagctggaagatggccgcaccctctctgattacaacatccagaaagagtcaaccctgcaccttgtcctccgcctgaggggcggcatgcagatcttcgtgaagaccctgaccggcaagaccatcaccctagaggtggagcccagtgacaccatcgagaacgtgaaggccaagatccaggataaagagggcatcccccctgaccagcagaggctcatctttgccggcaagcagctggaagatggccgcaccctctctgattacaacatccagaaggagtcaaccctgcacctggtcctccgcctgaggggcggcatgcagatcttcgtgaagaccctgaccggcaagaccatcaccctggaggtggagcccagtgacaccatcgagaacgtgaaggccaagatccaggataaagagggcatcccccctgaccagcagaggctcatctttgccggcaagcagctggaagatggccgcaccctctctgattacaacatccagaaagagtcaaccctgcacctggtcctccgcctgaggggtggctattaattcttcagtctgcattcccggcgggcactgatggcattactctgcactctagccatttgccccaatttaagtttagaaattacaagtttcagtaatagctgaacctctgttaaaaatgttaataaaggttttgt

SEQ ID NO: 3992 - DNA, 4758 bp, Rattus norvegicus
  Genbank Accession No. NM_138896
tggcgggtggaggatcgagcgctgttctcgctctggagccgctgcacatctcggaatcatttgcagcttattcactgtgtaaggaaaaaccaaattacatccataattctattgaactggaagcatagacgctgccatatatgtcacagtatacagaaaaagaaccatcagtaatggatcaagactccagcaaggctgcgtggcctagagcagcaggaggataccagacgattacaggcaggaggtacggaaggagacatgcgtatgtcagttttaagccatgtatgaccaggcatgaacggagcttgggtcgggctggcgatgactatgaagttctggaactggatgacgttgccaaggaaaacaccgcaggttccagttcattggatcaagtccatccttctttacccagtgaaactacagttgaaaaaagtgaaacagaaattcctacttgtggtccagcactgaatcaaagcacggagagcaacccatccgttgccacagtgtgtcatagtgaggaagtcagggagaccttagacagcagtacgaatcttcagaatcacgctgagagagagtgtacgccagcagtttgtaatgcctcaagtgtccagaatggaattgtgttggttcatactgactcttatgatccagacagcaagcatgatgagaatgactctcttcaactttgtgcccaagctgtggaaggtggtagacgtcagaaggtattaggcaatgcagtctttgagctggaaaatggagaggtagagagatatgctgatctgtgtccctcagttccctctctcagtggtgaaataagggaggagtctgaagagctaggttcagcactcttagagaaaaattctgctggcgatgcggaggctgtccatcaggatgggcaggaatttcagaggtcttctgaagacggcattgttagaaagaggcgacaagatgataccgatcagggaagacagacagaaaattcaactgaagatgcagactgtgttccaggccatgttgaacaaaatactagtgagagagccaatcaccatggaagttctcctgaacaggtagtgaggcccaaagttagaaaagtgatcagttcaagccaggtggaccaagagagcggttttaataggcacgaggctaagcaaagaagtgttcagaggtggagagaggctctggaagttgaggaatgcagttcagatgaccctataatcaagtgtgacgattatgatggagaccatgactgcatgttcctaaccccatcctactcaagagttacgccaagggaagcagaacgtcaccgtgcgacagcagaaaatggagccacagcttcaggaaggcaagaggctcgggaaaatgccttttggaatgcctgtggagagtattaccagctctttgacaaagacgaagacagttcagagtgcagtgatggggaatggtctgcttctctgcctcaccgattttctggcacagaaaaagaccagtcctcaagcgatgaaagctgggaaactctgccaggaaaagatgagaatgaacctgagctacagagtgatagtagtggccctgaggaagaaaaccaagaattgtctcttcaggagggagaacagacgtccttggaggagggggagattccctggttacagtacaatgaggtcaatgagagcagcagcgatgaagggaacgagcctgccaatgagtttgcacaaccagaagctttcatgttggatgggaacaacaacctggaggacgactcgagcgtgagtgaagacctggatgtggactggagcctatttgatggttttgcggatggacttggtgttgctgaagctatttcctacgtggatcctcagttcctcacctacatggcactagaagaacgcttagcccaggctatggagactgcactggcacacttagagtctcttgctgtagacgttgaggtggctaacccacctgccagtaaggaaagcatcgacggacttccagaaacccttgtcctagaagatcacaccgctattggtcaggagcagtgctgtcccatctgctgcagtgagtacattaaggatgacatcgcaacagagctgccctgccatcacttctttcataagccttgtgtctccatttggctacagaagtccggaacgtgccctgtgtgccgccgccacttcccacctgcagtgattgacgcatctgcagctgcttcctctgaaccagaccttgatgcctcgcctgcaaacgacaatgctgaggaagccccgtaagccgtcacggggaaatgagatcgaaattctatcacagtaaatctgcaaattccttctaaatctgatgtgcaaataattatatataaatatatttaaaatgctctatatagtatatgccgtagtttagaaagagaatattaacctttctaaactgaatttaggtttgcagaagatactaaacattttcaagctgaatgttgaagcagtgcatccattttctttagttgaacatggtgtccattgtaacgtcagtagtcatctctgtggcatacgtttctgttttgtctgaagtgctgccactaagagatcagaattaagctctcctttccacatcagatgtgaaaggagagcttaattctgatctctgtggcatacgtttctgttttgtctgaagtgctgccactaagagatcagaattaagctctcctttccacatcagatgtgaaaactgtgatcacaacagtagtacagtttggtttcattgaaaataaactgaattctaaagcatgctttttcactggtccctttgcttttgctacttcgagacctcttggtttatataacactgaggttaagattaaagcttttcagaatgccaggcaaagactagagttttgacccgaacacacacacaaaataaaaaaataaaaaataaattacatcttagatgtaaacttcctgaaactgtcatgtaataaactattcagtgaacgttggatgtttaaaggctagtaaagcatgtgaattatctgatgtgcttcatgctcggcacagtctcatgagcttggcctatgaaacactgtctaagccctcatgcagtctgcttctacttgttaaacactgaaggtccagaccagtcttggcatctgattaagaaattggatgtagttagctaaggtagtttgggttctactttaggagatctgaagatttgcacatggccatgtctgttacagcatcaccccagattagaaaggcacagcttttaggtggtcacacgagtaggcaagtctgtgcagacgctggtgtgataggtagcttacaggtgagccctgacatcagcacagggacaacggctcagcaggcccagcactggagcccatccgcgtgcacatctacctgccctgctcatccagttcgggaatatttctatagcttcccaaatcagcttcatctgatttgtgtaatatatctgagtatttatagtctttcttttttctccagtcttaaaaataaatgaattttcactgttggcacatttgaggcttaaatataagaaacctaacacttgcattctgatttttgcatatattgtaaatgtggctggtatttacagcgaatcctgtgtgtccttttatgggtaaaacaaaagtgaacattgcatgcaagtaatgtggtgaatttgtaatttaggggttttctggggcttctgtgactgtggatgcttaaattcaggccttaatgttgctctagctagcatgtttccttctaatgtacatagtcagcctgtatccactaatctctgcttgtcttctcctccgtggtcttcacaccgtatccactgatggtcagttagtgtcagaggtcacccaggttagcatcagttcccatgtgtgccgtgcggattgtgagccgtgtggttgcttggttggttttcttttatgtactttgattagctgtggcacttactgagtaaacttacgttgctgcagactgctgtgtaacaagccacgttttgtgtttagtcagtattacacacgggaccttgttttattcttctagatagcagctgtcccaaagaaaatatttcttctttgcctattaagatttagctattatctgccagttgttaaggggtttgattccaaactcaaccagagttgaacgtaagaaagctgctgtactcttgctgtccatctgttacgtcctccgttgttggctcctgactacgtacccacggctgctgaaggagacttgttttaatttgttttaaaaaggaaaatgaagttttaggactttgatggtggggaagctgacaagttcagaccccagtctgtcatttgctcttagcttggatccttttgaaaagttaagaatatatgaaggtaaattagaaaaagtaaaaatattgataaaatgtcatttatcttatgtctattttatgttgttatttggcctattaattttaattttttgaacattttcttatttcttgtaatatgaatgccgatatttaaagtttgactcacttgggtttcttttgtgtttcttagttgttatctctaagcctaactaacttttaagattatttgtgatatggatttatataagctgttaaatatatatgagctgttaaaatggaatgcaaggttttccaaagaccaggtctaactgtaatgattggtttattgttctacaatcccagcccggcattttccgtgtaaatcataaacaataaacaggatatactcagtgttcatttctaaaaaaaaaa

SEQ ID NO: 3993 - DNA, 2908 bp, Rattus norvegicus
  Genbank Accession No. NM_138900
ggaggtatcgaggaagagagaacagggaggtggggcggaggttcctcgcagagcctctggagccgcaggggcttcacggcatgaccagaagcaggagaggaggctgacccacttgttcccatcagctcctgaaggtgacactgagccctgggtggcccctcactgccaaagcagtcacctgtatttgtcagataaagacggccagcccggctgccctttacctccaagtcagagatccagagagccatgggcaaatcgccagagatgtggtgctttgtcttcttttctcttttggcatcgttttctgctgagcctaccatgtatggggagatcctgtcccctaattatccccaggcgtaccccaatgaggtcgtgaaaacttgggacatagaagtcccagaggggtttgggattcacctttacttcacccatctggacatggagctgtcagagaactgtgcatacgactcagtgcagataatctcaggaggtatcgaggaagagagactctgtggccagaggtccagcaagagtcccaactcccccactgtagaagagtttcaattcccatacaataggctccaggtggtctttacgtcagacttctccaacgaggaacggtttactggctttgcagcgtattactcagccgtagatgtaaatgaatgcacagactttacagatgtcccttgcagccacttctgcaataacttcattggtggatacttctgctcctgccccccagaatacttcctccacgatgacatgaggacttgtggggtcaactgtagtggggatgtattcactgccttgattggggagatcgcaagtcccaattatcccaacccatacccggagaactcaaggtgtgaataccagattcggctgcaggagggcttccgactggtgttgactatccggagagaagattttgatgtggaaccagcggactcagaggggaactgccacgacagtttgacttttgctgcaaaaaaccaacagtttggtccttactgtggcaatggattccctggacctctaactattaaaacccagagcaatactcttgatattgtctttcaaactgacctaacggggcaaaataaaggctggaagcttcgttaccatggagatcccatcccctgtcccaaagaaatcagtgctaattctatctgggagcccgaaaaggcaaaatacgtgttcaaagatgtcgtgaagataacctgtgtggatggattcgaagttgtggagggaaatgttggctcaacatcattctattccacttgtcaaagcaacggacagtggagcaattccaggctagagtgtcaacctgtggactgtggtgttccagaacccattgagaatggtaaagttgaagacccagaagacactgtattcggctccgtcatccactacacgtgcgaagagccatattactacatggaacaggaagaaggcggagagtatcactgtgctgctaatgggagctgggtgaatgaccagctgggtgtcgagcttccaaaatgtattccagtctgtggagtacccaccgagccctttaaagtacagcagaggatatttggaggatactctacaaagattcaaagttttccttggcaggtctactttgagtccccccgaggtggcggggctcttatcgatgagtactgggtgctgacggccgctcacgttgtggagggaaactctgacccagtgatgtatgtcgggtccacacttctgaaaatagagcggttgagaaatgcccagaggctcatcactgaacgtgtgattattcatcccagctggaaacaagaggacgacctgaatacacggacaaattttgacaatgacattgccctggtgcagctcaaagaccctgtgaaaatgggacccactgttgcccccatctgcctgccagaaaccttctcagactacaacccctcagaggttgacctggggctgatctctgggtggggccgaacagagattagaaccaatgttattcaactcagaggggcgaagttacccataacatctttagaaaagtgccagcaggtgaaagtggaaaacccgaaagcgaggtcaaacgactatgttttcactgacaacatgatctgtgctggggaaaagggtgtggacagctgtgaaggtgacagcggaggggcttttgctctgccggtccccaatgtcaaggaccccaaattctatgtggctggcctggtgtcctgggggaaaaagtgtgggacctatgggatctacacaaaggtaaagaactacgtggactggatcctgaaaactatgcaggagaatagtgggcccaagaaggactgatccgtagtaacaacacccctccaggactagcaaggtcatttttctcagatcctgggacggtcccattatttcaaaatgatggagagagggtgtgggagcatggttaacgttgaacatgattgtcaagaagcctgcttggaggcagagttgatcactgagccgtgttggttattcagttgctattgctaacaacatgcggaagcctttctgtcttgcttcatcccacagggatatcttaaacgatttccccctcatttaacccgcttgaaatccttattgcttacagtaaagcatgtttccaatctggttctggctgctcgagagcccagaaggagagggaaatttgagggtattttgtcatggaattcaggcatcgacaggttgtctgaaacactatgcagtcagggaacacagccttttttctaagtgagatttacccaatagctggaagtcagaattgactaccttagctttcctttgtgagttgtttcaatatgttccctagaaattagttttcttataatcctcctttgtatcatacaatgtaatgacttaataaaagagaaattgaacattg

SEQ ID NO: 3994 - DNA, 1711 bp, Rattus norvegicus
  Genbank Accession No. NM_138907
cgggcctacggctcagtctaaggactgcaaataggcagctggccactagaggatctctaacttttcctacgaaactgagggctgaagtcaaagatacaaaatggtggcctcgtctttcgctgtcctgagagcaagcaggttgtgccaatggggttggaagagctggacgcagctgtcaggtcctccgccgctcagcaccggtggccggaccacttttgcgcggacaaatgctacgctgagcctggagcccgggagccgcagctgctgggacgagccgttgagcatcaccgtgcgcggcctggcccccgagcagcccgtcacgctgcgcgcggccctgcgtgacgagaagggcgcgctcttccgagcccacgcgcgctaccgcgccgacgccggtggtgagctggacctggcgcgcgctcccgcgctgggcggcagcttcacggggctcgagcccatggggctgatctgggccatggagcccgaacggcctctctggcgcctggtcaagcgcgacgtgcagaagccttatgtggtggagctggaggtgctggacggacacgagcccgacggcggtcagcggctggcacaggcagtgcacgagcgtcacttcatggctccaggggtgcggcgcgtgcccgtgcgcgacgggcgggtgcgcgccacgctcttcctgcccccagaacctgggccctttcctgaaatcatagacctttttggagttggaggcggccttctggagtaccgggcgagtctgctggctgggaagggttttgccgtcatggctctggcttattacaactacgacgacctccccaagaccatggaaaccatgcgcattgagtactttgaagaagccgtgaactacctgcgtggccaccctgaggtaaaaggaccaggaattgggctgcttgggatttccaaagggggtgaacttggccttgctatggcctccttcctgaagggcatcacggctgctgttgtcatcaatggctccgtggctgctgttgggaacaccgtatgctacaaggatgagactataccccctgtgtcccttctgagagacaaagtcaaaatgaccaaagatggtctcttggatgtcgtggaagctctgcaaagccctttggtagacaagaagagcttcatccctgtggaaaggtctgacacgaccttcctgttcctcgttggtcaggatgaccacaactggaagagcgagttctatgccagagaggcctccaaacgcttgcaggcccacgggaaagagaagccccagatcatctgctacccagaagcagggcactatatcgagcctccttacttcccactgtgcagcgctggcatgcacctcttggtgggtgctaacatcacctttggaggggagcctaagcctcactctgtggcccagttggatgcatggcagcaactccagactttcttccacaaacagttgagtggtaagagttaggaggtgccccctaaaatataacctgttatgtggtggtttggggaaaaacccaaatatcagaatgccacttcagtttagttcatttgaacacatactaatttttttaagtttctttcttccttcctttctttctttctgttttttttttttgttgttgttgttgttgtttgtttgtttgtttgagacagggtttgtctgtttacccctggctggcctggaacttgctttgtagaccagaggctaggcctg

SEQ ID NO: 3995 - DNA, 342 bp, Rattus norvegicus
  Genbank Accession No. NM_138910
atgtcggcgtcggtagtgtccgtcatctcccggttcctggaggagtacttgagctccactccacagcggctgaagttgctggatgcctatctcctttatatattgctgaccggggcgctgcagttcggctactgtctcctcgtgggcaccttccccttcaactctttcctctctggcttcatctcttgtgtgggcagcttcatcttagcggtttgcttgagaatacagatcaacccccagaacaaggcggatttccaaggcatctctcctgagcgagcctttgctgattttctctttgccagcactatcctgcacctcgtcgtcatgaactttgttggctga

SEQ ID NO: 3996 - DNA, 1632 bp, Rattus norvegicus
  Genbank Accession No. NM_138911
atggagcaggtgaatgagctaaaggagaagggcaataaggccctgagtgctgggaacattgatgatgccttacagtgctactctgaggcaattaaactagatcctcagaaccatgtgctctatagcaatcgctctgcagcctatgccaagaaaggagactaccagaaggcgtatgaggacggttgcaagactgttgacctgaagcctgactggggcaagggttattcaagaaaagcagcagcccttgagttcctaaaccggtttgaagaagccaaacgaacctatgaagaaggtttaaaacatgaagccaataatctacagcttaaggaaggcttgcagaacatggaggccaggttggcagagaggaaatttatgaatcctttcaacttgcctaatctgtaccagaagttagagaatgatcccaggacaaggacactgctcagtgaccccacctacagggaactcatagagcaactacagaacaagccttcagacctgggcacgaaactccaagatccccgggtcatgactactctcagtgtcctccttggagttgatctgggcagtatggatgaagaggaagaggcagcaacacccccacctccaccccctcctaaaaaggaggccaagccagaaccaatggaagaagatcttccagagaataagaaacaggctctgaaagaaaaggagctgggaaatgatgcctacaagaagaaagattttgacaaggccctgaagcattatgacaaggccaaggagctggaccctaccaatatgacttacataactaatcaagcagctgtgcactttgagaagggcgactacaacaaatgccgggagctctgtgagaaggccattgaagtaggcagagagaaccgagaggactaccgtcagatcgccaaagcttatgctcgaattggcaattcctatttcaaagaagaaaggtacaaggatgctatccatttctacaacaagtctctggcagagcaccgaaccccagatgtgctcaagaagtgccagcaggcagagaaaattctgaaggaacaagagcgactggcttatatcaaccctgatttggctttggaggaaaagaataagggcaatgagtgcttccagaaaggggactacccccaggccatgaagcactatacagaagccattaaaaggaacccaagagatgccaaactatacagcaaccgagccgcctgctacaccaagctcctggagtttcagctggcactcaaggactgtgaagagtgcatccagctagagccaaccttcatcaagggttatacacggaaagcagctgccctggaagccatgaaggactatacaaaagccatggatgtgtaccagaaggcattagacctggactccagctgtaaggaagcagcagatggttaccaacgctgtatgatggcacagtacaacagacatgatagccctgaggatgtgaaacggcgggccatggctgaccctgaggtacagcagataatgagtgacccagccatgaggctcatcctggagcagatgcaaaaggacccccaagctctgagcgaacacttaaagaatcctgtaatagcacagaagatccagaagctgatggatgtgggtctcatcgcaattcggtga

SEQ ID NO: 3997 - DNA, 2003 bp, Rattus norvegicus
  Genbank Accession No. NM_139039
cgcaagtcctccgaagagactgtgtgcccgcaggtacctgtgttttccaataaaccctcttgctgattgcatccgagtggcctcggctcggtcattgggcgcttgggggtctcctcctgagggaaaggtcctctccggaggtcttttcattttgggggctcgtccgggatctggagatcctccgcccagagatcaccgacctccctccgggtggtaagccggccggcatctgtcgtgtcttgccctgtcttgtcttgtcttgtcctgtgcgcgtgttcagttcgtctcagttttggactcagatctgggttttggtcggaggagaagcccagggcttcggtgtctcagggttcaggaccctcagcgcctccgtttgggcgggatcagagaaggagctgacgagcttggacttctccccccggcagacctggaagacgttccaagggtgtctggagcccggttctttgggctcagcccgtatcgtggctttggttggaggagagggtccaggaccctcgggacctccatctgactctttgttttgggttttacgtggaagccccggcgcgtctgtctgttgtttgtctgatcgttggatttgtctgtctaacctaattttctttgaagctaccatgggacaatcgctaacaacccccttgagtctcactctagaccattggaaggacgtccgagaccgagcacgtgatcagtcggtcgagatcaagaaaggaaaatggcagaccctctgcatcgtccgagtggcccacttacgatgtaggatggccggtgaacgcacttttaacaagaccactattttgcaggttaaggacctgattttccgccagaagccgtacggacaccctgaccaggtggcctacattgtcacctgggagagcttggcatttagccctcctccttgggcagaaccctttgtggacccgaattggcttcctgtttcccctaaacctgtttccccgagcccacctgaccctttggttgcttcttcctctctctatcctgctctaactaaggaagaatctcccaaagtccctcccggaaacctgtcctcccagaggaccccaaattccccccttatagatctcctgttggaagaacctcctccgtaccctgtacctacagccccgccaagagaagaggaagtggagccgcctgctagacctcgactcgaggcggccccttcccctgtggctggaagacttcggggacgacgcgaggtggcgccagactccacctcccaggcctttccgcttagacaaggggctggcggccagatgcaatactggccattctcagcggccgacatatataactggaaacaacacaacccccccttttctaaggatccggtggctctcaccaacctgatagaatctgtcttgcttacccatcagcccacttgggatgatatacagcaacttttacaggccctcctgacctctgaggagaagcagagagtgctcttagaggccaggaaacatgttttgggggacaatggacgccccaccttgctcccggaagagatcgatgatgcattcccacttacaagacctgattgggatttcaccacggctgaaggtaggagacacctacgcctttatcgccagttgctcctagcgggtctccgaggggcggcacgacgccccaccaatttggctcaggtgaaacaagtggtacaagaggctgcggagactccctcagccttcctagagagacttaaggaagcttatcgcatgtataccccttatgatccagatgatccaggacaaatgacaaatgtctccatgtccttcatctggcaggcagcaccagatatcagggccaagctacagagaatagaaaatttacaagggtatacactgcaggatttacttaaggagggcagaaagaatttataacaagagagagatataaaaaaaaaaaaaaattcgaattccaccacactggcggccgttactctggatccgagctcggtaccaagttag

SEQ ID NO: 3998 - DNA, 1046 bp, Rattus norvegicus
  Genbank Accession No. NM_139081
tttgcgaacggcgagcagcggcggcggcgcgggaagtgcagcggaggtttttgctggtttcggaccccagcggccggatggtgaaatcctccctgcagcggatcctcaacagccactgcttcgccagagagaaagaaggggacaaacgcagcgccacgcttcacgccagccgcaccatgccgcttcttagtcagcacagccgcggcggctgcagcagcgagagttctagggttgcccttcattgctgtagtaacctgggtccggggcctcggtggtgctcctgatgtccctcacccacccctgaagatcccaggtgggcgagggaacagtcagcgggatcacagtctttcagctagcatcctgtactccgacgagcggctgaatgtgacagaggagccgacgtctaacgacaagaccagggtcctgagcatccagtgcacgctcacggaggccaagcaggtcacctggagggcggtgtggaatggtggtggcctctacatcgagctcccagctgggcctctgccagaaggcagcaaggacagttttgcagctctactagagttcgcagaggagcagctccgggccgaccacgttttcatctgcttccccaagaaccgtgaggacagagccgccctactccgaaccttcagctttcttggctttgagattgtgagacccgggcatcccctcgtccccaagagacccgacgcttgcttcatggtctacacgctggagagagaggacccgggtgaggaggactaggtgccagccctgcccagtgtccctgcaccctctcccgggtttgtccacatgtcatgattgtgcagaataaacgctcactccattagcggggtgcttcttcgagctgaatgctgtgtttgtcacactcaagtggtggctttaattctaaataaaggtttctattttacttttttattgctgtttaagatggtcaggtgacctgttttagagcagcctcctttgaagtctggaaaaatggtgtcacctcccctggctcaaacctaataaataaagtgatctcgttc

SEQ ID NO: 3999 - DNA, 357 bp, Rattus norvegicus
  Genbank Accession No. NM_139083
tcttagcgccatcttccttgagactcctgcgccatgagagcgaagtggcggaagaagagaatgcgcaggctgaagcgcaagagaagaaagatgaggcagaggtccaagtaaaccatcttgtgcacccacgaagcctgcgggagcagaagtaagggatgctgaagcccggaacaagtggttggactgtatgctgctgtcggtaataagtctcagtagacccggaatgtcacctcgccgagatcagctgggaaaatgactaccttcctcacaaccaaaacagtcccgctggccctctgccctggacctttggcattctggactagttctgttctcttgtggccaagtgtaactcgtgta

SEQ ID NO: 4000 - DNA, 1133 bp, Rattus norvegicus
  Genbank Accession No. NM_139089
cctcggctgagctgcattccaatcccagctacatccggagcccagctacattcgagcccagccacatcccgagccaaccttccagaagcaccatgaacccaagtgctgctgtcgttctctgcctcgtgctgctgagtctgagtgggactcaagggatccctctcgcaagaacggtgcgctgcacctgcatcgacttccatgaacagacgctgagacccagggccataggaaaacttgaaatcattcctgcaagtctatcctgtccgcatgttgagatcattgccacaatgaagaagaacaatgagaagaggtgtctgaatccggaatctgaggccatcaagagcttattgaaagcggtgagccaaagaaggtcaaaaagagctccgtaactagagagaagccactcgccacagtgctgagaccgatggacagcagagagacggtctctccacctccctttacccagtgtgcggctagtcctaactgtccctgtttctcctgaccatggtcccatcagctggtactcccactacagcgtgatggacaaggcctggtcctgagacaaaagtaactccagcagcaaggcttcccaattctctaagagctggtccgaatcttccctcaggcagctatgacggctctcctagctctgttccgtaagctatgtgcaggtactaatctcttcagcatgtgccatgccccagcctgctccacacaccctccttctccctagctctaagctcatcagttctgagttcacctgagctcctttatttcaaatgcagtccaggtgagatggcaaatcaagtttgtcagaacaaacttaccaccaccttcccaagggaatttcataactcagaatactcacaggaacctagacatgcatgtttaaatattatttaatgaccgactgtacaaagtggaactcctagatgtattttttgtacgattttcattgtatatgtaagaacttgtgtggttaagtatgtatcaatgggtagttaaagtttacataggcaaatgctttgaatgctacatattacaagatgtgttggatggttttcaaaataaaatgtactgtattgaatgtagtatgagacaaaaaagtaataaagtaataataactgacatga

SEQ ID NO: 4001 - DNA, 2151 bp, Rattus norvegicus
  Genbank Accession No. NM_139096
ggaaaacacatggtggggcctttctcagctgaacagtctacagaaagcttcgagctgcagccagcaaggaggctccaggaccatctgcagcagctgcctggacaggtgactgactacctgtctcttgctcccaggttgggcttccaggtcaggcaatggctcttctgtggctcctctctgtgttcttgctggttccagggactcaaggtgcaaaggatggagacatgcgcctggttaatggggcctcagccagtgagggccgcgtggagatcttctacagaggccggtgggggacagtgtgcgacaacctctggaaccttttggatgcccacgtcgtctgccgggccctgggctatgagaatgctactcaagcactgagcagagccgccttcgggccaggaaagggaccaatcatgctggatgaggtggaatgcacagggaacgagtcgtcactggccaattgcagctccctgggctggatggtgagccactgcgggcatgagaaggacgcgggcgtggtctgctccaacgattccaggggcattcacatcctagacctctctggagagctcccagatgcgctgggccagatctttgacagccagcaggactgcgacctgttcatccaggtgacagggcagggacatggggacctgagcctctgtgcccacacactgatcctgcgcaccaaccccgaggcccaggccctgtggcaagtggtgggcagcagtgtcatcatgagagtggacgctgagtgcatgcctgtcgtcagagacttcctcaggtacttttactcccgaagaatcgaggtcagcatgtcttctgtcaagtgtctgcacaagctggcctccgcctatggagccacagagctccagggttactgtggacggctttttgtcaccctcctcccccaggaccccactttccatacgcccctggaactttacgagtatgcgcaggccaccggggactctgtgctggaagatctgtgtgtgcaattcctggcctggaacttcgagcctctgacacaggccgaggcctggttgtctgttcccaatgccttgatccaagctctcctccccaagagcgagctggctgtgtccagtgaactggatttgctgaaggcagtggaccagtggagcacagcgaccggcgcctcccacggggatgtagagcgcctggtggaacagatccgctttcctatgatgctgccccaggagctgtttgagctacagttcaacctgtccttgtaccaaggtcaccaggccctgttccagaggaagaccatggaggccctggagttccacacagtgcctctcaaagtgctggccaagtacagaagcctgaacctcaccgaggatgtctacaaaccccggctttacacctcttctacctggagtagcctgctgatggccggtgcctggagtacacaaagctacaaatacagacagttctacacatacaactatggctcacaatcccgctacagcagctaccagaacttccagaccccacaacaccccagcttcctcttcaaggacaagctgatctcctggtcagccacctacctccccaccatccagagttgctggaactatggcttctcgtgtacctctgacgagctccctgtactgggcctcaccacatccagttactccgatccaactatcggctacgagaacaaagcgctgatcctctgtggaggctacagtgtggtagatgtcaccacttttataggctctaaggcccctattccaggtacccaggagaccaatagttccaagaccccctccctctttccctgtgcctcaggggccttcagcagcttccgcgaggtcatccgccccttctacctcaccaactccactgacacggagtagatggtacatctcagcggtggggactcagacattcctgtgttccctccttggcctccagcctctctgtaggaacctccagcagcctgccaccagatttcccttagcttccactgtctccatgagctttaaaatgtactagaaggtttcagccagtactcactccagatctgagagtctcagggcccccaattgtaggcacaaggaggtcctgtgggattccccatcagtcacagtcactaatctgaaatcattaaagtggcacgtgcttctc

SEQ ID NO: 4002 - DNA, 404 bp, Rattus norvegicus
  Genbank Accession No. NM_139099
ggaattccggggctcaggctactctgaagcgacccagcgttctgcctgacacgccccgctcgagacaccatggtggcgtactggcgacaggctggactcagctacatccggttctcccagatctgtgcaaaagcagtgagggatgccctgaagactgagttcaaagcgaacgctgagaagacttcgggcaccagcataaaaacagtgaaaataaagaaggagtagccgagcctgactgaagcctgacgtgcggagtcttccaggtgaagcatgtgggcacctgttccggcagatggaggtcagccgtacctcctggagacagacacccatcttgttgatgaattgactatgccaataaattaacacggttcactctcggcaaaaaaaaaaaaaaaaaaaaaaaa

SEQ ID NO: 4003 - DNA, 1263 bp, Rattus norvegicus
  Genbank Accession No. NM_139100
aattccggccatcttaggaggatgttctcgtccgtagcgcacctggcgcgggcgaaccccttcaacgcgccacatctgcagctggtgcacgatgtgtcgggtccccgcagccccccaggtccgccccggcgttcccgccacctggctgccgccgccgtggaagggtacagttgtgaatttggctccatgaagtattatgcactgtgtggctttggtggggtcttaagttgtgggctgacacacactgctgttgttcctctggatttagtaaaatgccgcatgcaggtggaccctcagaagtacaagggcatatttaatggtttctccattacattgaaagaagatggcgttcgtggtttggctaaaggatgggccccaactttgattggctattccatgcaagggctctgcaaattcggcttttatgaagtcttcaaagccttatatagcaacatacttggtgaggagaacacctatctgtggcgtacatcactgtatctagctgcttctgccagtgctgagttctttgctgacattgccctggctcctatggaagctgctaaagttcgaattcaaacccagcctggctatgccaacacactgagggaagctgtccccaaaatgtataaagaagaaggcttaaatgcgttctacaagggtgttgctcctgtgtggatgagacagatcccatacaccatgatgaagttcgcctgctttgaacggactgttgaagctttgtacaaatttgtggttcctaagccccgaagtgaatgtacaaaggcagagcagctggttgtgacatttgtggcaggttacatagccggagtcttttgtgcgattgtctctcaccctgctgactctgtggtctctgtgctgaataaagagaaaggcagcactgcctctcaggtcctgcagaggcttggctttagaggtgtatggaaggggctcttcgcccgaatcatcatgattggcactctgacggcactgcagtggttcatctatgactctgtgaaggtctacttcaggctccctcgccctcctccacctgagatgccagagtctctgaagaagaagcttgggttaactgagtagatatacatcaaagtaacatggactgaatctgcttgttgatcagtgttgaaagtgcaaaggaacttttatatatttgacaatgtaggaaatgtctgttcctgatacaattactgtagtacccttgcttaaagcaagagtttcaaacttactgctaaataaacccatccggaa

SEQ ID NO: 4004 - DNA, 2574 bp, Rattus norvegicus
  Genbank Accession No. NM_139102
atgctccgcctgggcgcgctccggctgcggggcctcgcgctccggagctcccaggggcgcccaagctccgccggcctccgggaaggacaggaaagcccaccctcacccccagaatggaaggacagagcagagactgtgatcattggaggtggctgcgtgggcgtgagtctggcttaccatctggccaaggcagggatgagagacgtggtcctgttggagaagtcggaactcacggctggctctacctggcacgcagcaggtttaacaacttactttcaccccgggataaacttgaagaagatacattatgacagcatcaaactttacgagaggctggaagaagaaactggacaggtggtggggttccatcaaccgggtagtatcaggcttgcgacaactcctgaaagggtggacgaatttaaataccaaatgacgcgaaccaactggcatgccaccgagcagtatattattgagcccgaaaaaatccacgagctgttccctttactcaacatggacaagattttagccggactgtataacccgggagatggccacatcgatccgtattctctgacgatggccctggctactggagctaggaaatatggggtccttctaaagtatcctgcaccagtgacatctctgaagcccaggccagatgggacatgggacgtggagactccgcaaggatctgtgagagcaaatcgaattgtgaatgctgcgggattttgggctcgtgaagtgggtaaaatgattggactagaccatcccctcatccctgtgcaacatcaatatgtcgtcacatcaacaatcccagaagtgaaggctttgaaacgagaactcccagtccttcgtgacttggaaggatcctactacctccgacaggaaagggacgggcttttgtttggtccctatgaaagtcaggagaagatgaaacttcaagcctcctgggtcgctcatggagtccctccaggctttgggaaggaactttttgagtctgacttagaccgaatcacagagcacgtggaagctgccatggaaatggttcctgttctgaaaaaggcggacatcatcaacatcgtaaacggtcctatcacctactctcctgacattctgcctatggtggggccccatcagggggtcaggaactactgggtggccattggctttggatatggcataatccatgccggtggggtcgggaagtacctcagcgactggatcctgcacggagaacctccctttgacctgatagaactggatcccaaccgctacggcaagtggacgacgacgcagtacaccgaggccaaagcccgagaatcatacgggttcaacaacattgttggttatcctaaagaggaacggtttgctgggaggccaacccagagagtcagtgggctctacaaaatcctcgagtccaagtgttccatgggtttccatgcaggctgggaacagccacactggttctacaagcccggccaggacactcagtataggccaagtttccgccgcacaaactggtttaggccggtgggctctgagtacaaacaggttatgcaaagagttggtgtgattgacctgtctccgtttggcaagttcaacatcaaaggccaagattccacccagcttctggatcatctctgtgcaaatgtcattcccaaggtgggttttacaaacataagtcacatgttgacgcccagaggtcgagtgtacgctgagctgactgtttcccaccaatctcctggggagttcctgttgattactggctctgggtcggaacttcacgatcttagatggattgaagaagcagccgtcagaggtggctatgatgtggaaattcgaaacataaccgatgagcttggggtcctgggagtagcagggccatatgcaaggagagtccttcagaagctgacctcagaagatctcagtgatgatgtcttcaagtttcttcaaaccaagtctttaaagatctctgacattcctgtcactgctatcaggatctcctatactggtgagctgggatgggagctgtaccacagacgagaagattctgcagccctttatgagcggatcatgaatgcgggccaggaggagggcatcgacaattttggaacatatgccctgaatgccttaagactggagaaggctttccgggcctgggggtcagagatgaactgtgacacaaaccctttggaagctgggctggactatttcatcaagctgaacaagccagccgacttcacagggaagcaagcgctgaagcagattaaagccaaggggctgaagcggagactggtgtgcctcaccttggcaacagacgatgtggatccagagggaaatgaaagcgtttggtacaagggcaaggtgattggcaacacaacatctggaagctacagttacagcatccagaagagcctggcttttgcttatgtcccagttgagctcagtgaagtgggacaacaagtggaggttgaactactgggtaaaaattacccagcaaccattatacaggaaccattggtactcacagaacctaccagaaccaggcttcagaaagatggtaggaaatcttga

SEQ ID NO: 4005 - DNA, 1422 bp, Rattus norvegicus
  Genbank Accession No. NM_139103
gtctccagtgtcacaggcagcttctcaaagtattatgtacttcaaaaaacggagatggtttctgatcctggaatcgcttttgctgtctttggtaactggatttcaagatcaatcagtaccaaatgtaaatgccataaccggcagcaacgtaaccctgacaatcctgaagcacccacttgcatcgtatcaacgtctcacctggcttcatactaccaaccagaagattttagagtacttccctaatggtaaaaaaactgtcttcgagtctgtatttaaagacagggtcgatcttgacaaaacaaatggtgcacttcgtatctataatgtctcgaaagaggacagaggtgactactacatgagaatgttgcacgaaactgaggaccagtggaagataaccatggaagtatacgatcttgtgtccaagcctgccatcaaaatcgagaagactaaaaatttgactgactcctgtcacctgaggctatcatgtaaggtagaggaccaaggtgttgactatacttggtatgaggactcggggccctttccccaaaggaatccaggatatgtactcgaaatcaccatcactccacacaacaagtctacattttacacctgccaagtcagcaatcctgtaagcagcgagaacgacacactgtactttattccaccttgtacgctggccagatcttctggagtccattggattgcagcttggctagtggtcacgttatccatcattcccagcatcctgctagcctgacaagatctctcctcagtcaagaaggaaacatcaaagccgtatcttgccttcatcccctgcactgctcctaaccattgacgctgctctggctccgtggagcaaaggaaagtgtgttattgttatctgtgctggtttgaatgcatgctctatggagtaagcacaggacctagtacagtgctacatcactgatctttacaaagattctaagctaattttttaaaaactgggggtagcatctaattttatataccctagttgtttcctaacattcattgaagataaatgcattccttttaccaaaatatgtggctatcttatactaatgttgtttatatcactctttttttataaagataaatgcattcctttaccaaaatatgtgactatatcatgctaatgttgtttatatcactcctttttgtgaagataaatgcattccttttaccaaaatatgtgactatgtcatgctaatgttgtttatatcactcttttttataaagataaatgcattccttttaccaaaaacatgtggctatattatactaatgttgtttatatcactcttttttataaagataaatgcattccttctaccaaaatatgtgactatatcatgctaatgttgtttatatcacctttttaaaaataaaatcttttcacatact

SEQ ID NO: 4006 - DNA, 811 bp, Rattus norvegicus
  Genbank Accession No. NM_139106
ggaattccgctgctgtcgctaagctaaagtcactgacgtttccgccaccatgctgcccgccgcattgcttcgtcacccaggtctgcgccgtctggtgctccaggcgcgtacgtacgcccaggccgccgcctcacctgcccccgccgctgggcctggacagatgtccttcaccttcgcctccccgacgcaggtgttctttgatggtgccaatgtccggcaagtggatgtgcctacgctgactggagcctttggcatcctggcatcccatgtccccacactacaggtcctacggcctgggctggtaatggttcatgcggaagatggcaccacaactaagtattttgtgagcagcggctccgtcactgtgaatgcggactcctctgtgcaattactagctgaagaagtcgtgacactggacatgctggacctcggggcagcccgggcaaacctggagaaggcgcagtcagagctgtcaggggcagcagatgaggcagcacgggctgagatccaaatccggatcgaggccaatgaagccctggtgaaggccctggagtaggcgtactttgtctgtcacccacagggtaacagaggcaggtcctggggggctgaagtcgccaccagggggcagcagtgctccggttactggcttaaagcttccctggtgctgcctgccaggtcatggagggcttccccaggcttccagagtctgggatccccaggatgcctctggagagctggccttgattgcccctcaaagccacccggacagtcagctggcccagcctatctgcattaaataccacggaattcc

SEQ ID NO: 4007 - DNA, 4951 bp, Rattus norvegicus
  Genbank Accession No. NM_139110
taaagtctgatctactgaaactctaccctcctcaggctgcctgaatgaatgggacacctttaagtttcacctcacctccgaggtctgcagtgcgctcttctattttaccacacagaagtaaatctgaggaggctgcccagtgctgaagagaaaggcaaagccactcaaacctgaagaaatgaaatcgtcaaggactgtcacgctctactttgtgcttattgtgatttgttcctcagaagctacatggagcaggccagcagagcccattgtccatcctttgattctccaagaacatgaactagcaggggaagagctactgaggccaaaaagagcagttgcagtgggtggtcctgtggcagaagaatacaccgtggatgttgagatcagttttgaaaatgtctccttcctggagtccatcagagctcacttaaacagcctccgttttccagttcaggggaacggcactgacattttgagtatggcaatgactacagtctgcactcctactgggaatgacctcttgtgcttctgcgagaaaggctaccagtggcctgaggaaaggtgtctctcctctctcacttgtcaagagcatgacagcgccctgccaggccgatactgcaattgtctgaaaggacttcctccccaaggacctttctgccagctcccagaaacatacattaccttaaaaatcaaagtcagactgaacataggatttcaagaagacctagagaacacatcctctgccctctataggtcctacaagactgatctggaaagagcgttccgagcgggttacagaactttaccaggattcagatcggtgactgtgacacagttcaccaagggcagcgtggttgtggactacatagtcgaggttgcatcggcaccactgcctggatcaattcataaagccaatgagcaagtcatacagaacctcaaccagacttacaaaatggactacaactccttccaaggaacaccaagcaatgaaacaaagttcactgtgacaccagagttcatctttgaaggagacaatgtaactctggaatgcgaaagtgaattcgtgtcctccaacacatcttggttctatggagaaaaacggtctgacatccagaacagtgacaaattctccattcacacctcaatcatcaacaatataagcctggtcacccgcctcactattttcaacttcacacagcatgatgcaggcttatatggttgcaatgtgacactggatatttttgaatatgggacagtcagaaaattagatgtcactcccatccggattttggccaaggaagagagaaaggtggtgtgtgacaataaccctatatcgttgaactgctgcagcgagaatatcgcgaactggagcagaatcgagtggaaacaggaggggaaaataaacattgaagggaccccagaaacagacctagagtctagctgcagcacttatacactcaaggcagatggaacccagtgtcccagtggttcttctggaacaacagtcatctacacgtgtgagttcgtcagcgtctacggagccaaaggcagtaagaacatagccgtgaccttcacctctgtagccaacctaacaataaccccggacccaatttctgtttctgagggacaaagcttttctataacttgcctcagcgatgtgagtagctttgatgaggtgtactggaacacttccgctggtattaaaatccatccaaggttttataccatgaggaggtatcgggatggagcagagtcggtgctgacggtgaagacctccaccagagagtggaacggaacctaccactgcatatttagatataagaattcatacagcatagccaccaaagatgtcactgttcaccctctgcctctggagtcagacatcatgatggatcctttggaagccagtggtctgtgcaccagttcccatcagttcaagtgctgcatagaagagaacgatggggaagagtacattgtgactttccacgtggattcctcatcctttcctgctgaaagagaagttattggcaagcaggcatgctacacatacagtctcccaggaaagttaccatcacggtgtcccaaagacattgacgtgttctgccactttaccaatgcagccaacagctcagtccggagcccatctatgaagcttacccttgttccagggaagaatatcacatgccaggatcccatcataggtattggggaacctgggaaagtcatccagaagctgtgccagtttgcaggtgtttctagaagccctggacagaccattggtggaaccgtcacttataaatgtgtaggctcccagtggaaggaggagacaagggcctgcatatcagccccaatcaatggtttgctccagttggccaaggctttgatcaagagcccctcccaggatcagaagctccctaaatacctgcgggacctttctgttagcactgggaaggaagaacaggatatacgctcatcgcccgggagcctgggagccatcatcagcatccttgatttgctttcaacagttcccactcaagtgaattcagaaatgatgagggatatacttgctaccattaatgtcatcttagacaagtccaccttgaactcctgggagaagttactacagcaacagagcaaccagagctctcagttcctgcagtcagtggagaggttttccaaagcgctcgagctgggagacagcacccctcccttcctcttccaccctaatgttcagatgaagagcatggtgataaaacgtggccacgcccaaatgtaccaacagaaatttgtcttcacagactctgacctatggggtgatgtagccattgatgagtgtcagctgggaagcttgcagcctgattcatcgatcgttactgtggctttcccaactctcaaagccatcctggcccaggatggacagagaaagacaccctccaacagcctagtaatgaccaccactgtcagccataatatcgtcaagccttttaggatttctatgacattcaagaacaaccatcgttcgggtggcaagccacagtgtgtcttctggaacttcagccttgccaataatacagggggctgggatagcagtgggtgcactgtggaagatgatggtagggacaatagggacagagtcttctgcaagtgtaaccacctgacgtcattctccattctcatgtccccagactccccagacccaggatctcttttaaaaatacttctggatatcatttcttacatcgggttgggcttttccatagtcagcttagctgcctgtctagttgtggaagccatggtgtggaaatcagtgaccaagaaccgaacttcctatatgcgccacatctgcatcgtcaacattgccctttgccttctgattgctgacatctggttcattgtggctggtgctatccacgatgggcattacccactcaacgaaacagcctgtgtggccgccacattcttcattcacttcttctacctcagtgtcttcttctggatgctaactctgggcctcatgctcttctaccggctgattttcattctacatgacgcgagcaagtccacgcagaaagccattgccttttctctaggctatggctgtccactcattatctcatccatcacagtgggggttacacagccacaggaagtttacatgaggaagaatgcatgttggctcaactgggaggacaccagagcactgctggcttttgctatcccagcgttgattattgtggtggtgaacgtgagcatcacagttgtggtcatcaccaagatcctaaggccctccgtcggagacaagccaggcaagcaggaaaagagcagcctattccagatcagcaagagcattggagtcctcacgccactcttggggctcacttggggttttggtctggccacagtgatccaggggagcaatgctgtgttccacatcatatttactctcctcaatgcctttcaggggctcttcattttgctctttggctgcctctgggatcagaaggtacaggaagctttgctgcataagttttcattgtcaaggtggtcttctcaacactcaaagtcaacatccttaggttcatcaacacctgtgttttcgatgagttctccgatatcccgaagatttaataatctttttggtaaaacaggaacatataacgtttccaccccagagacaaccagctcatccgtggaaaattcctctagtgcttactcattgctcaactaggaccagataatgccaaattcacaggagctctcagaaatagggcccctgccaagaaaagggacccatatccaaatctatgggtaaagtgttctctctgcagacttctgggagcagatgctgaagagactctttgaatagagaagatgctttcttttgtaaagacagactaaatgtttaattttgctcccacccctatcccttgtgtaatgccaaatatgtatagtatttaaaagaaccctcccacaaggctcaacctttctctgtgtattgtaaaatagaaaattgagagttttacacacacacacacacacacacacacacacacacacacacacacacaccccattggctacaaagataaaagctgattgaaacagtaagtaaaaagtgagtatccagaatttcagtgaattcaagaaaggaaggagtggggaggggagagaaaggatgatataatggaaggtaggaatgaagggaaggagggaggggtgagataggaaggaaggaaggatgatgtagaaaacgttagggagcacatcaatttccacaattgtgatctaatatggctactcatctaccacagccctgggaatgaaatatatggcttaaaaaaggaaaatgagatgaaaccatggggaatgtaggtaagtttctgatctttccctggctaaaaggataaaagacagaggagggaaagtagaaaagaaagtaggagggaaagat

SEQ ID NO: 4008 - DNA, 691 bp, Rattus norvegicus
  Genbank Accession No. NM_139114
catcaggtgagccaagatgggtgcatacaaatacatccaggagctgtggaggaagaagcagtccgacgtgatgcgcttccttctaagggtccgctgctggcagtaccgccagctctctgcgctgcacagggctccccgccccacccggcctgataaggctcgaaggctgggatacaaggctaagcaaggttatgtcatttacaggatccgtgtccgccgcggtggtcgcaagcgcccagttcctaagggtgcaacctacggcaagcctgtccaccacggtgttaaccagctgaagtttgcccgaagccttcagtctgttgctgaggagagagctggccgccattgtggagctttgagagtcctgaattcctactgggttggtgaagattccacatataaattttttgaggttatcctcattgatccattccataaagctatcagaagaaatcccgacacccaatggattaccaaaccagtccacaagcacagggagatgcgtgggctgacatctgctggccgcaagagccgtggccttggaaagggccacaagttccaccacaccattggtgggtctcgccgtgcagcctggagaaggcgcaacactcttcagctccaccgttaccgctaattgacgtaatatttgtaaaattcatatccaataaacaacttaggacagtcaaaaaaaaaa

SEQ ID NO: 4009 - DNA, 1016 bp, Rattus norvegicus
  Genbank Accession No. NM_139186
cctttttcttaatcacagactctgctttctgtttcctctctgccacgctccctttgaaaaggaaaacacacatcaggccaatttcccaatgctgggcaatggtggttacagctcaggtgtcctcgagggggcttttattccttttctgacttacgatagacagttgaatcttcaatacaaccgctgaagccgatttgtgaaacctacacactagcttagctgcaattaactgtgggtgagaacaagtcatttcagattcctcctcagcacctggactgccctctcactctctggatttaacttacagtttcagatgcctgaggttagccggacacacttttttgggttttttttatatacacaaccacatacagtccaaacagcaccaagcagccataaagactcctgggggatgttaagcctgagtttcataaggatagtaaacttaagggagccacgaagcctgaagacaaattcaggacaggaaagggcaaaacagccagttccctggtggctttcctcactggaaaatcaaacgtgtattcttactccaacagtcctgtccatgtttgcatgtcaccacactaagcaaaacacaacgagatcatatatgactagaactaagtgcatagaacgctgtcaggatcactgcttgctcttcctttttctcagtctttttttcccagagctttcaggtgctggagtcttttgtgtgtcttctttcactggtgacacaggcagtttcaaaatgatttcatcatcgtcattgatttccatcaactgtgatttccgtctttccaaaacgttggtgtacaaactggcgtgggatcctggttagcctcagaatccccatgagtgttagcaatgcttgaaatctctttctttggcttaggaaggaccagtgaaggaaaactataatcaatacccttcttagctagtttcttcctgagtaatttttccttcttcttaaaccgatattccatctttaacatctgcaaatgtcctcgttgtaaatc

SEQ ID NO: 4010 - DNA, 4689 bp, Rattus norvegicus
  Genbank Accession No. NM_139192
ctgaacacccatccggtgagacaggagggcaggtttccaagcgccgctccgccacacttgatctcagcgctgggaaagtgaagcgagcaaccgacagccacgatgccggcccacatgctccaagagatctccagttcctacacgaccaccactaccatcacagagcctccttccggaaacctgcagaatggacgagagaagatgaagaaggtgcccctctatctggaagaagacatccgtcctgaaatgagagaagatatccacgaccccagctaccaggatgaggaggggcccccgcccaagctggagtacgtctggaggaacatcatcctcatggccctgctgcacgtgggagccctgtacgggatcacactgatcccctcctccaaggtctacaccttgctctgggggatattttactaccttatcagtgccctgggcatcacagccggggctcatcgcttgtggagccacaggacttacaaggctcggctgcccctgaggatcttcctcatcattgccaacaccatggcgttccagaacgatgtatatgaatgggcccgggatcaccgcgcccaccacaagttctctgagacacacgccgaccctcacaactcccgccgtggctttttcttctctcacgtgggttggctgcttgtgcgcaaacacccggctgtcaaagagaagggcggaaagctggacatgtctgacctgaaagctgagaagctggtgatgttccagaggaggtactacaagcctggcctcctgctcatgtgcttcatcctgcccacactggtgccctggtactgctggggcgaaactttcctgcacagcctgttcgtcagcaccttcttgagatacactctggtgctcaacgccacctggctggtgaacagcgctgcccacctctatgggtatcgcccctacgacaagaacattcaatctcgggagaacatcctggtttccctggggtccgtgggcgagggcttccacaactaccatcacgccttcccctacgactactctgccagtgagtaccgctggcacatcaacttcaccacgttcttcatcgactgcatggctgccctgggcctggcttacgaccggaaaaaagtttctaaggccgctgtcttagccaggattaagagaactggagatgggagccacaagagtagctgagttctgggcttctgagttcctgttccaaaagttttctgggcagagatttaatattctgttgattaactactggataatgctatcggaatgttaatgatgcatttaaactattccggtacagtattatgagaaagctttgatcatgttttgaggtaatgcatattttaattagccaggattaaccatgccacaatacatatatatttctaagcatacatgataaatgcatatacaattgtgcacatcagctttaaataataacgatgaatttgaacattctatacagagagtattaaagccaaggaacatgctgttttgatgctagggcaagcatggtgctctttccctgtttgcactgcatccagcttcgttccttcctctgtcatcaccatcttcaggcaaatagctgaccagccactggcctgtgtccaccttccaaagcccaggcaacctttctgctttctgaaatactgatccttcctcctggatatgtctttccttgttctgaactttgagattgctggctcagacttaagatagaacaaaaaccttcctggaagttcccactggtgaacttcactataggttttgccagagggaatagggaaattatcttgattgtagcaagtagatcaccttgagagaagaattagcacgcacggtgtggtttgtaagtaaggatgggagagagctaggaaaaggtggccatatctaatggcctacttaccaagcccccaggcctctctgcataggcatggagtccttccagtccatattctgaacaacagtttttagtgagatttgaataattaaattattttcagagtgaagggaatgggaaatgcatggtctgtgccaggggcggagagtggggaagggttagcttttggtaactgaagatttcttcaatggaaagactcttaatgttaaatgtgcctagaactggtaactaaacagctgacatttggagggaatgtggtgaaaactatgtaaatataagcaaaatccgcacatgaaaatatttcacttagaaaaagtgttgctaaagaaaaaaattcgaaggacaagaggtgttgcctgggttgccagtttctttcgtggcagggcaggaaatagtgaggttgagaggcagcatctgtaagtagatgctaagaggtacatttctaaatgaagcccttggggaacatctgccagggatctagagagtgctggtttcatccattgttttaatttcctccttggattgagtagaaacgtggcttcttgtggtgttgaaccttccccgacttctttgctttgttgccatctagcctgcccagcactgcctagggagcgcctacccaccctgatttcttctgccagctcctacccaccctgatttcttctgccacttctttctttggcattcatttttctttccctggacaggaagctagttacccgagtgtatcaggagcacctggcttgcctttgtccaggcccattcctcctggtatccttgggtgtggaactgctggacagcttcaggaagcagagccaggtgccacttttctgtggctccagatcctccctacctccacccctatgtgcctctgccacagtaatttcagaaaagcttggtacaccctctagcaacatcttggttcagagagtctctctggcttgtgagttaacagctcagccaaatgctgtgttgtctcagtgaggcaaccactgaacgagagggttggttgttgggctgtctctgttggagtcagagtagacaacatgttcacttcttcctgtctgctttgcaaggtgtctgtgactgatcaaggcaggcagggagtggtatagtacttctgaaaggaagaagttccctatttatctgttaaaagaccagaggcatgggcaagtgctcaggacctcacttcgggaagagggtctgcttcctgaaagccagtgtataaggaaaagcttcgactgaacctggtatctaaggtaccatgaactaacactctatcacacagcccagggcaaacagtggtatagaaaagtctagaagaaaacatcacatcagtattttagaaccatccacctttactgtccctgtagcccaatccagagcctggcttttagatctggctgcgtacagtgccaaatgctcagtttacttgtaagatcagagcctttctttctgtgttaattgaacacatgctctgagctgttttgttgaagtagaaaatctagtagaaaatcactgtagatctgatgacctggaaacctctggaaatgccttcgggtggttttatttttccaggtcacagatgcctgatttataagatgaacaatgaaatcagctttctttctcttctgatcttattccctggatttgatgcagcccatgttccaaagcaaagctacatagagacttcaggctgaggtcctggtgtctttaagcaaggacactctttcagatcctctcagaggcgtatttgtaacagtttccacatgaatgtactaatcatgttgggtgccttatcgctttcctaatctacagtgcctgttagcccagcctcactccttcccttaaccctgagatcccgtagatggagcgggtgtagacaagaggctggctggaggatcatcagtacagtgatttgcagaaatcttttatgggcttcattttggaaaaatttgtttttagtaaatgctcaaatttggtgggaagtaatttgaatgtatttgattgtattgtcctcattacaattgttaattagacacgttctacatgacagtagtactcaggggagttttctccctgggctgctaatatctgggtgtaatctctgaaactgtaggtccagtgaggcggcgtgaaaagttagcaaagccaccatctgctggtggtttaagccaaggcctctcttcttcgccactgacttgctatgttatcctttctcttgtaacaaacccatcccagagatgaggcctttaatcatcccaagaacctcctgggctaagtatctgacagtctcacatctcaacatcgtgtattaagtgtccagaacatcagctcaggaggacacgctgaaactctcactctgggcgagtcctgataaaacaggctcctaatactgacctacctcaagggcagttctgaggtgattagagccttttctttttttaagcaagtgtttggagatgcatggcagaggttttcctgcagacttgtaaagagctagatgtgttctaagaccatctttagtctacattgctcttcccagagatctacaactatgacccagccaaagtgcaagcctacctactcactgccataaaaactattcaggaaaccttttcctggcctgaatgagattttgttttttttttttttatgtggggcggttatttgtgacccaagtgtaatttggatgatttttaattaatatcaactcttgaagcctaatatgtactggatttgagattgcatttgttcctaataaaagtggatctagctgtgctgcctgg

SEQ ID NO: 4011 - DNA, 1603 bp, Rattus norvegicus
  Genbank Accession No. NM_139252
cggtcgggcagtctccacggccatgtgatcctggggctgccgggacagttggggcaagcgggggtcgcgggcgtccctgggcgggggtgacatggagcggaggtgggtcttcgtgctgctggacgtgctgtgcgtgttggttgcctctctgcctttcatcattctgactctggtgaatgcaccatataagagagggttctactgtggagacgactccatccgctacccataccgtccagacacaatcacccatggactcatggctggggtcatcatcacagctactgtcgtccttgtctcatcgggggaggcctacctggtgtacacagaccgtctctattcgcgctctgacttcaacaactatgtggctgccatctacaaggttctgggaacctttctgttcggggccgctgtgagccagtctctgactgacctggccaagtacatgattggccgtcttcgacccagtttcttggctgtgtgtgaccctgactggagccgggtcaactgctctggctacgtgcaggtggaggtgtgcaggggcagccctgctaatgtcaccgaggccaggctgtccttctactctggccactcctcctttggcatgtactgcatgttgttcctggcgctctacgtgcaggcccggctctgctggaagtgggcacggctgctaaggcccaccgttcagttcttcttggtggcctttgccatctatgtgggctatacccgagtgtctgacaacaagcaccactggagtgatgtccttgttggcctcctgcagggagccttggtggcttgcctcacggtctgctacgtttcagatttcttcaaatctcggccaccccagtcttgccaggagaatgaagagtcggagcgtaagcccagtctgtcactgacgttgaccctcggtgaccgaccctaactgctatgcttcggaagctgggaagccacctgtgggccagtcacgtgttggccccttgtccctgatcaggcactgctggctttggagctgccctagggtcctgctggtgactgtggaccagggtcttggtgcctgtctggctctgagtgtgggcagggcccgtcctcattgttccttgactccatggcctccaaagatgcggtcctgctctgagggcgccatgtcccatcaccaatgggttttcgaggaatgccatcccagcatggccccaggaatggttggtccgagactgttcatgaagtcagcaccctccttgatggccctcagggagtgaataccttgtttgcctgagtggggcggttggccttggccttggccttgggcaaggatcacaagtgtgaagatggctgccaacccttgggctgcctaggagtctgggttgcctggaaggtcacgtgtagcttttggtctgaatctttttctcaagcctgcataagattactgcctgaggcctccaagcccctccctcaggattgatgtcgtatcctgtccccactttgtccatatggaccaaatgtgtagccaggcattggaagtcctggatctgccatccccatctgtttcaaaacacttcaagctactgtttcatgggaaaggtgtgttataaactttgtaccaagt

SEQ ID NO: 4012 - DNA, 1771 bp, Rattus norvegicus
  Genbank Accession No. NM_139253
gcgtcagggggacgcagctggcaaggttcatccacaagtgcttcgcgactgcgtcagggattatcagggtactggaagcatggcatccctgcagctgctcagaggtcccttcctgtgtgttctgctctgggccttttgtgttcctggtgccagggcccaggagcatggggctggtgtccaccatggcagcgtgggcctggacaagagcacagtgcacgaccaagagcacattatggaacatctggaaggtgtcatcaaccagccagaggcggagatgtccccacaggaactacagctccattatttcaaaatgcatgattacgatggcaacagtttgcttgatggcttagagctctcgacggccatcactcacgtgcacaaggaggaggggagtgagcaggtcccacccatgagcgaggacgagctcatcagcatcatagacggtgtcctgagagacgacgacaagaacaatgacggctacatcgactatgcagagtttgccaagtcgctgcagtaggcggcaggccctttcctgtatgcacacgtgacccttgctaatgtgatggacattctggtaatgagaagcagcttatttctgtctactgctgcagcgctggtaaagcctgtggcagtctgttagactggggtaggaggaagccacaaggaatacggagagaagtggggcagtgtcaatgtgtgtttaaacctgttggacaagagctcgaaccttccgaagggtggtggggtatctcaagctcccgggaacctgactctagatgccactctaacttcttgatgttatttcatgctacctgaaaagtaaagacagtctgctttgccaagtggagacttcagtgacggtggagggagagccaaaagccgcgtatcttcccagttgggtcctgctctgggcagatgtggtcagtatgctgttccccaggcatacagcatcacgtcctaaagccacagcaggagaagaatgtcacccacggagtccaccagacacagagtgaagactccttacccactggcattttggaagcgaagcaccactggcctgaatacttagccttttcagatcttcagtttccttcacaactactgccacaccctgtgctctgtcatttcagcccgagagaaaccttgaattgggtgtgctctccgctcaccacccaccgtttgagctccctgaccttgtgttttatccttgctcccagggctcccttcttggcttatgaactattaacttggtatcgcaggtttaaactgtcagctgctctagcctaagtcagaccagaaaagatcagtcattaagggtggtggctaaccttatccaagttttgaaggaatgtttttaaaattacctctttgagcctgaatatgataattcttttaatttcagggaagaacagaaaaggaagagcagtagtagctgaaagagaaacagccataggtcgtactttgcgttgtgaaacgtcatagacttactgtaaacgaatccagaatgatggtgggatcagaaaaagaaactgaatcaaatttgctttacgatgtatagagacttattttctttattaaagtattcttgtaagaaaacttacgtatttgtaaaacagttttctgtgtcaagtatttgtgcaatcggagctgacttgtaaactattcttgtaagatctcattattttgaaagatttatataatgaactctgactatctgacaataaaatggatgaaaaagtaaaaaaaaaaaaaaaaaaaaaaaaaaaaaaaa

SEQ ID NO: 4013 - DNA, 3438 bp, Rattus norvegicus
  Genbank Accession No. NM_139324
ggcaagttgtcgggcggcggcatgttcagctggatggggcggcaggcgggcgggcgcgagcgctcgggcggtatggacgcggtgcagacggtgacgggaggcctgcgctcactctaccaacgcaaggtgctgccgctggaagaggcgtaccgcttccacgagttccactcgccagcgctggaggacgccgacttcgaaaacaagcccatgatcctgctggtgggccagtacagcacgggcaagaccactttcatcagatacttactggagcaagatttcccaggcatgagaattggtccagagccaaccacagattccttcattgctgtgatgtatggggagaccgagggaagtacccctgggaatgctttagttgtggatcccaaaaagccattccgaaagctcagtcgctttggaaatgctttcctgaacagattcatgtgctcacagctgcccaaccaggttctgaagagcatcagcatcatcgacagtcctggcatcctgtctggggaaaagcagcgcattagccgagggtatgacttctgccaggtcttacagtggtttgccgagagggttgacaggatcatcctgctctttgatgctcacaaattggacatctcagatgagttctcagaggcgatcaaagccttccggggccaggatgacaaaatccgagtggtactgaacaaggctgaccaagtggacacacagcagctgatgcgagtctatggggccctcatgtggtctctgggtaaggtcatcaacacacccgaagtacttcgagtctacattggctccttttgggcacagcctctgcagaatacagacaaccgccggctctttgaggctgaagcacaggacctcttcagagacatccagagcctgccccagaaggctgcagtgcgcaaactcaatgacctcatcaagcgagcaaggttggccaaagtccacgcctacatcatcagctacctgaagaaggaaatgcccagtatgtttggaaaagaaaataagaagcgagaacttatcttcagacttccagaaatctatgttcagctgcagcgagaataccagatttctgcaggggacttccctgaggtcaaggccatgcaggagcagcttgagaactatgacttcaccaagttccactcactgaagcccaagctgatcgaggctgtggacaacatgctgaccaacaagatctcatccctgatgagcctcattagccaggaggagatgaacatgcccacgcaaatggtgcagggtggtgccttcgatggcaccacagaggggcccttcaaccagggctatggggagggagccaaggagggtgctgatgaggaagagtgggtcgtggctaaagacaagcctgtgtatgatgaactcttttatacactgtcacccatcaatggcaagatatcaggtgtcaatgccaagaaggaaatggtgacctccaagctgcccaacagtgtcctgggcaagatctggaagctggccgactgtgactgcgatggcatgctggacgaagaggagtttgcactggccaagcacctcatcaagatcaagttggatggctatgagctcccaaacagcctgccccctcaccttgtgcccccctcgcacaggaagtccctgccaaaggctgactgagagtacagagctgggatgggaggggtggtgcctgggcctgaagtctgctctgccactgacttgctgaatgtccttggccaagattctgtcctctccgtggctcagtttcctcatatgtagggcagggagggcagattctggacactagataatgtccttatacctctaaagtccctaagtttctatcaaaatattaagaagacaaaaaataaaaaaaaattaagaagagcaatatatagatatgaagataaaggtctaagaagaaaaagaaattatccaaagaatataggtgtgacacaggctggcgaactctggggactcagggagtgaggaagctcattggagtcttcagggctgtgctggacagttcattaccatgaacctctgtccttcacaggcactgagaggcggcaaatgacctaatttatttttcttactgtgtttcctgctctagctagagagggaacagagcagagagcttctgctctccacagactgacaccaaagagaagactaatccccaggtttgaaagaggatgtgccatgtctgtgggccatctgcagcccccagcagagtaggcagccaggccaggagagccagtgttgtcccagcacctgctgcctgatcctgccaagcctcccgctcagcaaagtcggaattcacaaactgtggccccctggaagacctttagacctcaaatcacgctgaagcccgggcactgcctccttgcatttcatccataggttacagcagagctaatttatcagacgtaaggaaagagacagttcctgtctgtcactaagtgtgccctttgaccactgaatgtcccaaggcttttgggtaggtggtagaatttaaattcaatagagccatgtcttgatttgtgtggagtcccagagcctttggacccaagtaaagagaccagccccatcctgagccatcaatggaagagatcagtgtcttggtattgatgctttggtttgatttttaaagaaaaaaatgcattttattgtgtccagttgtgtttttctcacacaatgaagcctgtgcagaaatctctcttgtaacaccttttcttccaagcttatacacttcacatcaggagtgcccatctggggccaggatcaggctgcttctgactgctcagtgttctctcccaagcccttgaatttctctgccccacttattcaggcacaggggctgcttctactgtaccctgctctgggcacagctgaggagcactgtcaccatcacttgacaaagcaggagtcacagcacagcagtgaccacatggcccagccccaacagcaccagaaatgaatgaatgtgaaccttcacaaaaacactccaacccctaattgtttgcctctggcaacctcagggtcagaaccagtgacaagagaaaatgctagaagctcacccctgttatcccagcacttgagaggcaaatggagggggattaccatgagttcgaagccagcctgagctacatccttagtgttatggtagtctgtgtaaaacaagagtacttacgtcatcactcacggttccctatcttactgtctaaataattgctctaagagaaacatggtgccctttactctgaaagcatgtcttactaattggacacacacaggtgaacatttgatcctggggctgtaactgaatgtgggcatttttgtggtgtgaagaccctggtgtccacagagtggtgatgccttggggctgcctttcctcccaagtgtcttctgctttctctgcacagttggcatatatctaccctcgtgccg

SEQ ID NO: 4014 - DNA, 1853 bp, Rattus norvegicus
  Genbank Accession No. NM_139333
ttcccagctggggtgctgtttgaaagcagtttccgttagctgcagaaggctgaggcgcgccaccggccacctccccacgtgaagcagttgtgcgagcatccgcacgccgggcagctgtctacccgcgtccgagcctccggaagcggcgggggaccggaagtggcccgcggaggctgcagagctagtccgggaacccgctgtgaggcgactggcagcagcgctacgacggcgccatgtccctgatctgctcgatctccaacgaagtgccagagcacccatgcgtgtcccctgtctctaatcatgtgtatgagcggcgactcattgagaagtacattgcagagaatggcacagatcctatcaacaaccagcctctctcagaggagcagctcatcgacatcaaagttgctcatccaatccggcccaagcctccctctgccaccagcatcccagccattctgaaagccttgcaggatgagtgggatgcagtcatgctgcacagcttcactcttcgccagcagctgcagacaacccgccaggaactgtcccacgctctgtaccagcacgatgctgcctgccgagtcattgcccggctcaccaaggaggtcactgctgctcgagaagccctggctaccctgaaaccacaggctggtcttattgtacctcaggctgtgccaagctcacagcccagtgttgtgggtgcaggagagcccatggatttgggtgagcttgtgggaatgacccctgagattatccagaagcttcaagacaaggccactgtactaaccacggagcgtaagaagagaggaaaaactgtccctgaggagctggtgaagcctgaagagctcagcaagtaccggcaggtggcatcccatgtggggctacacagtgctagcattcctgggattcttgctctggacctgtgtccctcagacaccaacaagattcttactggtggggcagataaaaacgttgttgtctttgataagagtactgagcaaatcctggccactctcaaaggccataccaagaaggtcaccagtgtggtgtttcatccttctcaggaattggtgttttctgcgtcccctgatgctactatcaggatttggtccgtcccgaacacttcttgtgtacaggttgttcgggcccatgagagtgcggtgacaggactcagcctccatgccactggagactatctactgagctcctctgatgatcagtactgggcgttctctgacattcagacagggcgtgtgctcaccaaggtgacagatgagacttccggctgctctcttacctgtgcacagttccaccctgatggcctcatctttggaacaggaaccatggactcccacatcaagatctgggacttgaaggaacgcaccaatgtggcgaacttccctggccactccggccccattaccagcattgccttctctgagaatgggtactacctggccacggcagctgatgactcctcagtcaagctctgggacttacgcaagttgaagaacttcaagacattgcagctggacaacaactttgaggtgaagtcactaatctttgaccagagtggcacctacctggcgcttgggggtacagatgtccagatctacatctgcaaacagtggacagagattcttcactttacagagcatagtggcctgaccactggagtggcctttgggcaccacgccaagttcatcgcttcaaccggcatggacaggagcctcaaattctacagtctgtaggccctatgccttgtcacagttctgggcctcatctcagtagtgggttagagttagagggtgggggtggggggtgggactttaggaggagagggaggtctggttatg

SEQ ID NO: 4015 - DNA, 2362 bp, Rattus norvegicus
  Genbank Accession No. NM_139334
ttttcaggttggaggctggtttttatacagaggtaactcacagggtggatcaccagctgctgctgcagggcaccagtctggcagaagtcccgtcagggatggctgtgggaagacgatgttacatagactgcccggtacacagtcacaccagacacaagcaaggacccacgggcactgagcaggatgggatgggtaggacggcaagtctctggcagccgatgacaaccgcgccttctcaggacactggattaggaaccaagaaaccaagcagtatcgttggatccttcgagaatatctaattctcacatttgccgaggggctagcctcaaacccaccgtgtagctgagattccaggcatgtctcaccatgccgagctttaccgtttgcctctgaaaaccgggccagtaacctttactttctagagctgcctggaggggaaatgccacagagagcaacacttaccaaagtactcaacagagctggcacacagaggtatctaattagtaactcttttttgtttttgtggagctgaggactcaggccttaagtatgctaagtaagcactctaccacagagccccagtcagtcccagccagtgttactaattctgagacagggtcttgttatacatagcctaggctggccttgtacttgctctggagcccaaacgggccttgaccttttgacctattggcctcaaccccctacccagctgggatgacaggccggcacgccctggcttcaataaataattcttaacttctcagataggacttttctctgtccaacatggtggaagccccctctgcagattggttagggcatggctaccttagaagactccttggagcctgtagcccctggagtgcccaggaccccggaatacacagagccaggacagctgatgggggagggagctgcagcccctgggaggtccctgcagatgctgggtacacgctggaggcattggggttaggaccaaagtggttctgcacataacagaggccagaagcaggctggtacggaggtaggctgggcaagtgtccgggaggccaggaggccagtttctgaccactggcatgctgcatctgggtgacagggtgacttcgattccgctccaaggggcctgctgcgagtggaggagctggaggaccagggccagacactggctaatgtgttcatcctgcggctgctggaaaacgcagatgaccgggaggccacctatatgctgaaggcatcctcccagagcgagatgaagcgttggatgacttcactggcccccaacaggaggaccaagtttgtatccttcacatctcggctgttggactgtccgcaggtccagtgtgtccacccctacgtggcccagcagcccgatgagctgacactggaactggcagacatcctgaacatcctagagaagacggaggatgggtggatctttggtgagcggctgcatgaccaggagagaggctggttccccagttccatgacagaggagatcctgaaccccaagatccgctcccaaaacctcaaggaatgtttccgagtgcataagatggaggaccctcagcgcacgcagaataaggaccgcaggaagttgggcagccggaatcgtcaatgaatcccccccagctcaggcaccagcctgaaggagggggtgtgggcagggatgggaagcaggcccagcagagatgcctgacagattcagagggttttagggaagaatgtcagtcgcttcccaggcagcaggagtggcttgggcctgttctgtccctgcccacgcagtggatgttccagcatcctggccactcgcttgcttacacactggcggaaggctaagtacttaggcagtattagaccaccaccctccagcctctcagagggaggagggcaggcattctccagagaccttccggggactggaggagacccacacaagggtccctggcagcagggaggtggaaggtaaccaccgtcaggatcccctgaactgcacgtgtccttccctaccttggaagcagctaagagtctactgggcacaccgatggaccacccctgcccaagggagcttggtgagcagtgctgactctgcctgcccatccccgtgcctctgccagcctcttttgcacggccaagccctgccctcagcaggcctcccagagcttagctgagggttcatgccacctctagctccctgaagggcttgatgtcacgtgtgtctcctggcccctgaaggagcccaggtgttttgcagaatgaattggtcactgcatcctttatggtcatggttttgagaaaagcaaatatcatttttggctgcattaaaagaagcatcctgtatgaaacgaaaaaaaaaaaaaaa

SEQ ID NO: 4016 - DNA, 1030 bp, Rattus norvegicus
  Genbank Accession No. NM_139337
gcggcagggcgtggagcctgggtgcgcacctgggcccccctggccatggccgcgaaggtggacctgagcacctccaccgactggaaggaggccaaatcctttctgaagggcctgagtgacaagcagagggaggaacattacttctgcaaggatttcattaagctgaagaagatccccatgtggaaggagacagcaaaagggctggctgggaaggtggagaaccccaagtataagaaggacaagcagctgaatgagaaaatctccctgttccgtggggacatcaccaagctggaggtggatgccattgtcaatgctgccaacaactccctgcttggaggcggaggggtggacggctgcattcatcgggccgcgggatccctcctgacggacgaatgccgcaccctgcagaactgcgagaccggcaaagccaagatcacttgcggctatcggctgccagctaagcatgtcatccacacggtggggcccatcgctgtgggccaacccactgccagccaggcggctgaactccgcagctgctacttgagcagcctggacctgctgctggagcaccggctgcgatcggtggctttcccatgcatctccacaggcgtgtttggctaccccaatgaggaggctgcggaggtagtgctagctacgctgcgcgaatggctggagcagcacaaggacaaggtggatcggctcatcatctgtgtgttcctggagaaggacgagggcatttaccaggagcgcctgccccattatttcccagtagcctgaggctcccactgcccaccctgaacaggactgacccacctgggcctggaggacctcgttctcagctctgagaggtctcagaagcctgcaacttgttccagcctggccacagcagggttctgccctcaccccgagcctgtcctgccctgcctttaagaagcctcctaataaagctgtctggttcagccctcaaaaaaaaaaaaaaaaaaaaaaaaaaaaaaaaaaaaaaaaaaaaaaaaaaaaaaaaaaaaaaaaa

SEQ ID NO: 4017 - DNA, 2075 bp, Rattus norvegicus
  Genbank Accession No. NM_139338
gtcgacgctgggcctcctccccgctggtgccccctcaccacacatgcagatctaggattgggcctgggtcttccacttcttgaaatccatgccgaattcccttgctggcgaccaggtccccaaccctactctggatgcaattggcctggtggactggagtctgagaaatgcagggacctctggttccaccccaggcttagaggagggaggcacagacccctggaccttctctcagctgaagaatactgaccaactcaaagaggttggcacagccagcaagctgcaccaggtggtcagcggcttcctcaaggcatgcggactcctgggaagcctctactttttcatctgctccctggacatcctcagctctgcgttccagctactaggcagcaagatggccggagacatttttaaggacaatgtggtgctgtccaaccctgtggctggcttggtcattggtgtggtggtcaccgtccttgtacagagctccagcacatcttcctctatcgtggtcagcatggtggcctctaagtcgctgactgtccaagcgtctgtccctatcatcatgggcgtcaacgtgggcacttccatcaccagcactctggtctcgatggcacagtcaggggatcgggatgaatttcagagggccttcggcggctcggccgtgcacggcatcttcaactggctcacagtgttggtactgctgccactggagaatgccactgcggcactagagagactgagtgagctggccctgggtgctgctagcctgcagccaggggggcaggcccccgacatcctcaaggcactgactcgacctttcacacacctcatcatccagctggatagcagtgtggttaccagcagcattaccagcaacaccactaacagcagcctgattaagcactggtgtggcttcaggggggagacgccccagggaagcagtgaggaatgcgacctctcgggctcttgcacagagaggaacagctcagcatctccaggagaggacagactgctctgccatcacctgtttgcaggctcagagctcacagacctggctgtgggcttcatcctgctggcaggttcgctgctggtgctctgtgtctgtctggtcctcatcgttaaactgctcaactctgtgctgcggggtcgcattgcacaggctgtgaagaccgttatcaatgcagattttcccttcccctttggctggctcagcggctacttggccatcctcgttggagcaggcttaaccttcttgcttcagagcagtagtgtcttcacggcagccattgtgcctctcatgggggttggggtgatcaacctggaacgggcctaccccctcttcctgggctccaacattggcaccaccaccacagccttactggctgccctggccagccctgcagacacgttactcttcgcagttcaggttgctctcatccacttctttttcaacctggctggcatactgctgtggtacctggtgcctgtcttgagactgccaattccattggccaagcgctttggggacctgactgcacaataccgctgggtagccattgtctacttactactcaccttccttctgctacccctagcagcctttggactttccctggctgggggttcagtgctggctgcagtggggggtcctctggtggggctggtactccttatcatcctggttaatgtcctgcaacgacaccgaccatcttggttgcctcgccgtcttcaatcctgggcctggctgccactttggctccattctctggagccctgggaccgcctggtgactggttgttgccccttcaaggcctacagcaactcccatatgaccagcaaagtggctcactgctatgagaacccacaagtcatagcttctcagcagttgtgagaagtgggtgcccatcaaaacccagttccactagcttcggggcattggaggcaggagaaaccactggccaatcttccctggggctgagtggcagggctccacatggatgttttagtctctgcatcctctccttttcaaataaacgaggttactattaaaaaaaaaaaaaaaaaaagtcgac

SEQ ID NO: 4018 - DNA, 1979 bp, Rattus norvegicus
  Genbank Accession No. NM_139341
aagagggcaatcggggttaagagagaagaggggaggacaaaggaaagagtctgggtcacggagacaggaagcccacgatgtccgcacttcgcgccgaacagcagccaagcagatccggagagaggcaaccactggtggctcaaggccggtgggggccccgacggtggaggcggacagcagctgctgcggtgctgctagtggagatgctggaacgcgctgccttctttggcgtcacctccaacctcgtgctctacctcaacagcttgaacttcaactgggatggtgagcacgcgtcgcgggccacactcctcttcttaggcgcctcctacctgctggctccggtgggaggctggctggccgacgtgtacctgggccgtttccttgctatttcgctcagcctgctgctctacctggctgccactggcttgttgctcaccaccatcaccgacgatggccgcagatccttctgtggagagatgcccgagttgccactgaaacctgcctgtccatccgcaaactgccaaggctcctggtccagcccctactgcgcgaccaccctctacttagtgttgcttctcttggcgctggctgccagctccgtcaggagcaacctcacctcgttcggggccgaccaggtgatggatctcggccgtgatgccacccgccgcttcttcaactggttctattggagcatcaatctgggtgccattctgtccctgctggtggtggccttcatcgaacagaacatcagcttcctacagggctacagcatcatcgtgggcctcgtgggcctggcattcttcatttttctcatcgccacacccgtcttcatcaccaagcccccaacaggcagccaagtgtcatctatgctgaaccttgcattccaaaactgctgtcccgggtggcagtggtggcggaggccctcttccaggaactctgaaggtgctcacctgttgcctgaccagaggtctaaccagcctggaccttctccacaagaagatatggccaacttccaggtgctgttgaaggtcctgcctgtgatggtgacccttgtgccttactggatggtgtatttccagatgcagtccacctatgtcctacaaggtctccacctccatatccccaacatcttccgcaccaaccctaacatctctttgccactgagatcggatagcagtaactacaggatcccagaagcctggctcctgctggccaatgttgcagtgatactgattctggtccctgtcaaggaccacttaattgatcctctgctgctgcggtgtaagctgctgccctcggctctgcagaagatggcgctgggcatgttctttgggttcacttccatcatcgtggcaggagtcctggaaaaagagcgcttgcagtacattgctgccaaccagacagtgcctcagctgattgggaaggacttatactatgcggcaccactgtccatctggtggcaaatcccccaatacctgctcatcgggatcagtgagatttttgccagcatcccaggtctggagttcgcttactcggaagccccacgctccatgcagggcgcaatcatgggcatcttcttctgcctttcgggggtaggttcactgctaggctctggcttggtggccctactgtcccttcctggaggctggatgtactgccctaaggacttcgggaacatcaacaactgtcgtatggacctttacttcttcctgctagccggcattcaggctgtcacagctgtcctgtttctctggattgctggtcgttatgagaggactcgtcaggacccagactcccagaactcaaccagcagagtcaggggctgaaatggtctccacccaccctgatagagagtgtcacagcagtaccagccatgcccattcttttatcatttattctgtacccaacattagaatgaagtggttcccataaataaggggcatgcgccctccctcttgaaaaaaaaaaaaaaaaaaaaa

SEQ ID NO: 4019 - DNA, 2034 bp, Rattus norvegicus
  Genbank Accession No. NM_144746
ggcacgaggcggcggcgcggtggcggcagcggcagcgcggtggcggccggggctgagcgctcggagcgcctcggtcggccgcgctcagctgggcgcgtcccgcccgcgccatggcaggagccggaggtggcggctgcccgacgggcggcaacgacttccagtggtgcttctcgcaggtgaagggcgctgtcgacgaggacgtggcggaagccgacatcatctccaccgttgagtttaactactctggagaccttcttgcaacaggagacaaaggtggcagagttgttattttccaacgggaacaagagaataaaggccgcgctcactctaggggagagtacaatgtttacagtacctttcagagtcatgagccagagtttgactatttgaaaagtctagaaattgaagaaaaaattaataaaatcaggtggttaccgcaacagaatgctgctcattttctactctctacaaatgataaaactattaaattatggaaaataagtgaacgagataaaagagcagaaggttataacttgaaagatgaagatggacgacttcgagacccatttagaattacggcactacgggttccaatattgaagcccatggaccttatggtagaagcaagtccacgacgaatttttgcaaatgctcatacatatcacataaattccatttcagtaaatagtgatcatgaaacatatctctctgcagatgatctgagaattaacctatggcatttagaaatcacagatagaagcttcaacattgtggacatcaagcctgctaacatggaggagctgacagaagtcatcactgccgcggagttccacccacaccagtgcaatgtattcgtctacagcagcagcaaggggaccatcaggctgtgtgacatgcgttcttctgccctctgtgataggcatgccaagttttttgaagagccagaagatcccagcagtagatcctttttctcagaaataatctcatctatatctgatgtcaagttcagccacagtggtcgatacatgatgaccagagactatctgtcggtgaaggtatgggacctcaacatggagggcaggcctgtcgagacccaccatgtacatgagtacctacgaagcaagctctgctccttgtatgagaatgactgcatctttgacaagttcgagtgctgctggaatggttcagacagtgccattatgacggggtcctacaacaacttctttagaatgtttgatagaaacactcggagggatgttacactggaagcctcaagagagaacagcaagccccgagccagcctgaagccccggaaagtgtgttcagggggtaagaggaagaaggatgagattagcgtggacagtttggacttcaataagaagatccttcacacagcctggcaccccatggagagcattattgctgtagctgccaccaataacttgtatatattccaggacaaaattaattaaggaactgactggaggaccaagtgttgtcttgcatacatacataagccggtcgttttcctgtccaaaaaaggcattgtcctctccattgagaatagtgacgcacttctacttccctcatagacacaggagaagaaggggtctcagctggagccttgggagagatgagtgctgctgctgaagggaaaacctacttgaagctgaattggtggactctgctcaataaaggccattactcaaatgtatttatttaagtctgagccttcctttccagtttttagaccaaaaaactaacatctgagaggaaaaaaaatctcatcaaatctctccagctcttacctctgtctctgccatccatccctgggccttatcctggacatggtgtggccaccacccacgttcctctctggccctggagcccagtggtgcatcacccaccgctggtgcgtggtgcatggctgtgccgagcaggctcaggcagctcttcctcacccactgcacctgccatcacaccttctgtggagctacttaataaacacagcacactgtgaagtgtttctcgtgc

SEQ ID NO: 4020 - DNA, 2525 bp, Rattus norvegicus
  Genbank Accession No. NM_144750
tcaccctgcgggctcctccgcttcccggtcttgctttccctttggctctgtccccactgaggagtccgctgtcccagccatggcgcgtgctaccggacccgagcagcggctgctggccatctacactggcggcaccatcggcatgcggagtgaaggcggagtgctggtacctgggagaggcctggctgctgtcctgaggacacttcacatgctccacgatgaagagtatgccagagcccacagcctgcccgaggatacgctggtgttgcccccggccagttctgaccagaggatcatctacaaggtgctggagtgccagccactcttcgactccagtgacatgaccatcactgaatgggttcagattgcccaaacgatagagagacactacacacagtaccagggctttgtggtcatccacggcacggacaccatggcctttgctgcgtcagtgctctctttcatgctggaaaacctgcagaaaccggtcatcctcacaggtgcccaggttcctatccacgaactgtggagtgatggccgtgagaacctgctgggggctctgctcatggctggccagtacgtcatccctgaggtctgcctgttcttccagaatcagctctttcggggcaatcggacaaccaaggtggacgctcggagatttgcggccttctgctcccctaacctgccccctctagccactgtgggcgcagacgtaacaatcaaccgtgagctggtacggaaggccagttggaagagccacctggtggtccacagcaacatggagcctgatgtgggcctactgcgcctctaccctgggattcccgcctccctggtccggaccttcctccagcccccactgaagggcgtggtcatggagacctttggctccgggaatgggcccaccaagccggacctaatacaggagctccgggcggcggccgaaagaggcctgatcattgtcaactgtacccattgccttcagggggctgtgacttccgactatgcacctgggatggccatggcaggagccggcataatctcaggcttcgacatgacatcagaagctgccctggccaaactgtcctatgtgctgggccagccagggctgagcctgagtgacaggaagaagctgctggccaaggatcttcgcggggagatgacactgcctacaacagatgacttgctgggagatgacatgctgggctgcagggccacatggcttctcagtatgaatggcagccaggatgccgatgccatgaaggatgttctgctgcccggcctggccctggctgcagctcatgctggtgacctggacactctgcaggcctttgtggagctgggcagagacctcaacctgaaggactacagtggccagacgccactgcatgtggctgcacggagagggcatgcttcagtggtcgccatgctactgcagaagggtgtggatgtggatgcctgtaatgaggacggtcagagcccactgctgctggccgtgaggggcaggcatcagagtgtcatcaggctgctgagggccgctggggctcacctgtctccccaggagctggaggacgtggggacagagctgtgcaggctggcatcaagggcggacagcgaaggcctgcgggcgtggtggcaggctggggctgacctaggacagccggactatgatggacactgtgccctgcaagttgctgaagcagcagggaatgcagatgtggtggctctgctgcagagtcttgaggacagggtcagcgcccagccccagccccattagttcttgggctggtctgatgcctcctcagtgaactctcattggtttacgactggatcctggcaccagagccagttctggagacggctagaggaagtgggcataagagatgggtcattcgtccagagcccttcttggggaccccgagagtaaacacggtcttcgggagatagggctggtggggcttcgtgtagaagcccagctcagaccttcaccctacccagtctggagctgattgactggaaggacctaggcctgctcccagctgacatccatccccactgctctggagttttgaggcttggcggactatcctcaactcctgggactgcctggattccatacacaaggcttctggggtggagtacggggaggcctgccctggatgcatccctgtagtcctcggaagaccttgtttccaggaagtgctccttggcccccaacctgttgcagcaggagctgtgtcttactgcccgtgggacctcacgcacataccagcagactggctgctatgttagcaccattctagttggtgagacctcgaagctttcagaagccagctctgttctggccttgttatctcctgcagccaggtgtcccaggagctgactcagagctatggactcctcctccctaagttgcgggggcgggggggggggtcgtcttctgctaaactgcttcccagcctgttggcatgacaaatctggaggtctttgttgagtagaatgtcaataaagccatccggacagctgct

SEQ ID NO: 4021 - DNA, 2004 bp, Rattus norvegicus
  Genbank Accession No. NM_144755
ggtgccgcagcactttagcagcggaagcggctgctgttgagtacgtgacggctggggtctggcacgggcgtgctgggactccgagataggctcagtgaggctggcagcggtccacgggcgcgggcgcaggcggctctgagacctcaggacaagatgcgagccacatctctggctgcttctgccgatgttccctgcaggaagaaaccgttggagtttgatgacaacattgatgtcgagtgtccagtcttaaaacgagtgagagatgagcctgagcctggaccaacccccagcctacctcccgcctcagacttgtcacctgctgtggcccctgcaacccggctggggccctatatccttttggaacgagagcaaggcaactgcacctatcgggccctgcactgccccacaggcacagagtacacctgcaaggtgtatcccgccagcgaggcccaggcggtgctggcaccgtatgcaagactgcctacccaccagcacgtggcccgtcccacagaggtcctgctgggctctcagctcctatacacctttttcacgaagacccatggggacttgcacagtctggtgcgcagccgccgcggtatccccgagcccgaggctgccgcgcttttccgacagatggctagtgcggtggcacactgccacaagcacgggctcatcttgcgcgacctcaagttgcgtcgatttgtcttcagcaactgtgagaggacgaagttggtgctggagaacctggaggatgcctgtgtgatgactggaccagacgactctctgtgggacaagcacgcgtgccctgcctatgtgggaccagagatactcagctcccggccatcctactccggcagagcggctgatgtctggagcctgggcgtggcgctcttcaccatgctggctggccgatacccgttccaggactctgaaccagccctgctctttggcaagatccgtagagggacctttgccctgcctgagggcctatcagcctctgctcgatgcctcatccgctgtctcctccgcagggagccttcagagcgacttgtggccctgggaatcctgctacatccctggttgagggaggattgcagccaagtctctcctccacggtctgaccgaagggagatggaccaggttgtcccagatgggccacagctggaggaggcagaggaaggggaggtggggctgtatggctagagccaccttaactggcccttcagctccaaggtgtgagttgagtactggtgtctcagctttcgcctgcctttttgggccaagctaaactgtaagtgcctttctggaggaagaaacagccattgtgcttcatgcattcctgtgcacagtggggtgatgctgtctggatgacaagccctgttctaggtgctgtgaacagcaaagaaaaaaaaaaaagagggagaagcataccttgctggccgagttaccacagtgccacatgctccccaggccagcatctaccctctgcccggggcatatttcataccagggctgggccttctctggtctggtgctaggcttctgttcatgggacagtccctttcatcagtgccccagctgccttctgtcttgtgcctttaaacaaagggaacatctctgtgccaaagaccaaagtccccattcaccctgtgccttggggccacaagtgaggccaagctgggattgtggcctccaggcaggagaacctgcttgaagacctggctgctggactcaagccaaaaggatgagactccaataaagaggcatctggctcaaagaatggtctagaatgaggatccaggtctgtctaccctggtagcctccagctggagcatcaaagttggagggggaaggaccaggcagggactgtcctattgccatttagagtctcaggccctgctcttgggattcttagtatccaggactgctgtcagtttgatgactttggtttggttgagtatgtattttcaccatgtgcccaataaaagagagctgtgtggtttt

SEQ ID NO: 4022 - DNA, 3742 bp, Rattus norvegicus
  Genbank Accession No. NM_145085
cgttgctgcagtttgcagctgcgggaggccatggggcgcttcgccgctacgctggtgggctcgctgttcggtctggggctgctgctgtgtggtctaggcaggctggcgagcgccgagccccgggcccctccggaaaagatcgcaatagttggtgctggaatcggtggtacttcctcggcctattatcttcggaagaaatttgggaaggacgtgaagattgatgtgtttgaaagagaagaaatcgggggccgtttggctactttgaaggtgcaaggtcatgactacgaagcagggggttcagtcattcaccctctaaatttgcacatgaagcgatttgtcaaagagctgggtctctccagtgtgcccgcttcaggtggcctggtgggagtgtacaatgggaagtctctggtgtttgaggagagcagctggtttataatcaacgtgattaagctggtgtggcgctatggatttcagtccctgagaatgcacatgtgggtagaagacctgctcgacaagttcatgaggatctatcgttaccagtcccatgactatgccttcagtagcgtagaaaagttgatgtacgccattggaggggatgactatgtcagactgctcaaccaaactctccgtgaaaacctgaagaaagcaggcttctctgagacgttcctcaatgagatgatcgctcctgtcatgaaggtcaattttggccaaagcactgacctcaatgcttttgtgggtgcagtatcaatgactgctgctgattccaacctttgggcagtggaaggtggtaataaagttgtttgctcagggctccttcaggcctctaacagcaatcttatatctggctctgtaatgtcaatagagaagacaaggaccaagcagacaggaacccccccgaagatgtatgaagtggtttataaaacaggatctgagatccattctgacttctatgacattgtccttgtggctgccccattgaatcggaagatgtccaacataaccttccgaaattttgatccccccatcgaggaattcaatgacccatatcaacagctcgtgacaactctcatcaaaggagagctcaattctaccctcttcagctccaggcacaaggatcagttcggcctgtctgcgattcttgtcactgatgactcagatatgtttatcaacagcctgtccattgtggcctctgtaagtcataaggagggtcccccaccggcagtggatggcatgcatgtgtggaagaccttctccaaggacattctcaccaaagaacaaatctcaaagctcttcctgtcctacgattatgctgtgcggaagccgtggctgtcctacccttactacaatcctcctcagaagtgtccctccattatcctccatgaccggctctattacctcaatggcatcgagtttgctgccagctgcatggagatgagtgccatcgctggctacaacgcagcgctccttgcctaccaccgttggaacggcaatgaggacatgatcgatcaggacgacctgtatgaaaagcttaagacagaactgtaattgagcactgcccctccccagagcaccctgctctccaaggattgagtcaacaaagtcttccccagcacctctcttgtgggtcgtgaagcgtccctgttcctcggagaactcgatgttctgtcagaatgtcttcgcgctttggttttgggggaggtgcaggattgaacctgaggccctgtgcatgctgggcaagcgctctgctactgagctgagctacacacctcgccctcatccatggttttgtttttggtttttttttttttcagactgggtctcactaagttgtccaggtggaatcctcccgcctcagcctccaaagggcctggaattacaggccctccatattaggcctggttgttaaccatttgaagaaacatttgagtgtttcccaggcttgtccagttttaagagtcatctggaacttgatagacttgtcagcctgggtttgcttaggttgtaatctttctctctcttcttcttcgggggcagttaacaactaggtcttagtctgcaccctaggctggaactcattattaagcccaggttggtctttaaatcacagcaatcctcctgtctcaacctcctatgggctggatacaggtgtttcccagttcctggaagtttacacttttttgatgtaaatgttctcaagcctaaagtcagactttaagaatgtgactttttgattgcttctgtcttggttttatcagggatagactcagagatagagacagagatatcctgtggttgggaaccaaatatgagctattaagtccaagaaactggcattgtaatacgaggccctcataggaggaagtctgtgtcttttcacactaaacccaggtaccctgagtatatcagtacaaaagctctaccactgtagctacattgccagccccaggagttccaggaccgacatccagagcaatgggatttccgaggttgaggatggagtctcggctctatagctttgtcaaattcaagttcctcaaatgcagccaagggtgagcaagtcctgggtgacagggttaaaccatctctagagagcttcgagtgccttaaaagtgctaagcaacacaaatcatgaccacagcagactcgtgccagaggtgactgactggctgctcagtggttactcagctgtggtctccatgggaatgagcactagaacagaagcagcctgagtgaggccagagcagtaggccttagaaccaggtcttcatggccacttgagttcagagggagtcgtaccagatgctgggcatgtgcagtgaggggcctttgctgcaatcttaagacagtggctctcagtggtgctgcacattcgaatcaggtttctcatatgtagacaagctcaagaaagctaatgtttcttccactgttcagaggtcaccagtgactgtcatagccactagtattaagagaaaaaaagtaattttgcctgctttggtggtacatgcctgttctctgtatttttgtgacaaaacaagaaggtcaagagttcaagaccagcctgggctgtggcaacagcctatctcaaggaataaaaaccaactctcttcaccagattataacattgcttcaataaagtggtcttaaaaaaccccggttctgggttggggatttagctcagtggtagagcgcttgcctagcaagcaaaaggccctgggttcagtccccagctccaaaaaaaggaaaaaagaaaaaaaaaaaaaaacccggttcttaaaaattatttttccctgctataactgtggggattaatgtgtggagaaagcagccatgatatatttgatatagtgacaaattaaatccatagtttaatcaaaaggttggctttttttctagttcattcagagacatttgtattttttttcctgtagtggtgtcaatgaatgtggtttgtcaaaaatataacacttgtggatttggtacagtggctgttcatgtgaggggtgtatgtttcatgacccccagtgggcacctcgaactgggaagcagtgagccccacaatgttctattttccacgtgtacaatagacctgtgataaagtcttaatttataaatttggcacagtaagagactaacaacaataattataaagtaattataaaatagaagaattgtaacaaattgcgatgggagtcgattaaaatttacaacttaaaaaaaaaaaaaaaaaaaaaaaaaaaaaaaa

SEQ ID NO: 4023 - DNA, 386 bp, Rattus norvegicus
  Genbank Accession No. NM_145672
catgaagtccgttgctctattcctcatgggcatcatcttcctggatcactgtggagttcgaggaaccctagtgataaggaatcagcgatgctcctgcatcagcaccagccaaggcacattccactacaaatccctcaaagacctcaaacagtttgccccaagccctaactgcaacaaaactgaaatcatcgctacactgaagaacggagatcaaacctgcctagacccagattcagcaagggtgaagaagctgatgaaagaatgggagaaaaagatcagccaaaagaaaaagcaaaagagggggaaaaaccatcaaaggagcaagaaaacccgaaaagctaaaacaccccaccatccggagtcaaagaagactgcataagagacca

SEQ ID NO: 4024 - DNA, 3150 bp, Rattus norvegicus
  Genbank Accession No. NM_145677
ggcatatcttgtgctagtttcccaggaacccggcattccctactcttgacttctgccggcacttgctcctggtggtagctgagcaccgggtctcaccagcatgctctgcctgtgcctgtatgtgcccatcgctggagaggctcagactgaattccaatactttgagtccaaggggcttcccaccgagctgaaatccatcttcaaactcagtgtctttatcccctctcaggagttctccacataccgccaatggaagcagaaaattgtgcaagcaggtgacaaggaccttgatgggcaactggacttcgaagagtttgtacattacctccaagaccatgagaaaaaactgaggctggtgtttaagagtctggacaaaaagaatgatgggcgaatcgatgctcaggagatcatgcagtccctgcgggatctgggtgtcaagatctctgaacagcaggcggagaagattcttaagagcatggataagaatgggacaatgaccatcgactggaacgagtggagggactaccacctcctgcaccctgtggagaacatccctgagatcatcctgtactggaagcactcgacgatcttcgatgttggtgagaatctgacagtcccagatgagttcacagtggaggagaggcagacagggatgtggtggaggcacctggtggcaggaggtggtgcaggggcagtttccagaacctgcactgcccccctggacagactgaaggtgctcatgcaggtccatgcctcccgcagcaacaacatgtgcatcataggtggattcacacagatgattcgagaagggggcgccaagtccctctggaggggcaatggcatcaatgtcctcaaaattgcccctgagtcagccatcaagttcatggcatatgagcagatgaaacgccttgttggtagtgatcaggagacgctgaggatccacgaaaggctagtggcaggctccttggctggggccattgcccagagtagcatctacccaatggaggttctgaagacccgaatggccctgcggaaaacaggccagtactcgggaatgctggactgtgccaagaggatcctggctaaagagggtgtggctgccttctataaaggctacatccccaacatgctggggatcatcccgtatgcgggcatcgatctagctgtctatgagacattgaaaaatacctggctacagcgctatgctgtaaacagtgcagaccctggcgtgtttgttctcctggcctgtggcacaatctccagtacctgtggccaactggccagctacccactagccctggtcaggactcggatgcaggcacaagcctccattgagggtgcacctgaggtaaccatgagcagcctcttcaaacagattctgcggactgagggggcctttgggctctaccgggggctggcccccaacttcatgaaggtgattccagctgtgagcatcagctacgtggtctacgagaacctgaagatcaccctgggcgtgcagtctcggtgacgggagggtggcggacttggtgaccctgggctgcagcccagggtgtgcagccgcctcattctgtgaatgtgccaacactaagctgacttacccaagctgtgaaacccaggatgctgcaggggacgggcagggagctgcaagcgctgggctggtcctgctgacctggcagacctttgtgtctcttccaaggaagacctgtggacattccttggggtccaggggtcagtaagatgtgggctcctgcacctagagacaggacgttttccacagtgcctgccaggtagcgagcttggatgccagcttagctcttccatctcgtcacgcaacctgacctcagccatggcatccctctggtccaaagagcattcctgtgcccctcatctcttcccactgatgcgctggggtaggaagtgggcccacccccactcttatccttctgtccatcttccctcagtgctgctcttccaaacctggttcccaagctgtagcatccatgaggactgtggtacgggaagctggagaagtaccattatgtcctcgctcgcctattctgagctcaccagcaaggccacctggatgcgcccaggtcctcaggcaccggctgcctgacaccatggtgcatggctttgctaaaagctagtgctagaacctggaacccagaggatttgtgctgcctgcatgggcctaatgtcctctgagctgcccctaaaccctgtcaggactggcaccagctcgtgcccacactcatggtggttctgtggtgagagggtgggcagggtgtctgctccaggtctgctgctctggtgagaagatgctgaaggccttaattatgtcttactgggtaaaggatttggttcagaaggacaagctggacactgcacgtgccacactttcagagagcctgggggaaagtgtgttctgagggccctgtggggccaagggggaccagcctcacattccacacgtgtgccactctgcttggagcctatttattttgtatttatttgaacagagttatgtcctaactatttttatagatttgtttaattaatagcctgtcattttcaagttcattttttttattcatatttatgttcatggttgattgtaccttcctgtcaccagctggtggggcatggggagacaaggtagaaaagtggccacagagtgaccttacctgctgcccacactgacggcatgtccgtctcacaggaaacagaaggaaaggcacagggaggactcttcaggccaggtagggtagtgggaaaggtggcgacttcttgacattctttcctggaccgggaggttttctttattttgcccttttggaaaacacggcagtgaggtgcttcattcaccaggaatttggtgtgagggtgaggactgaagggcctgccttccccaacctgtgacctggtctcgctcctggcccgagactgcccatgctcaatgagtggccagctggccacttggcaatcatgcctccattgccccagaatggcctgatgaggaaaatccaaataggatgcaaagatcaatgcaaaagtcaccagtctgcatagtctgtgctgtaactggagtttgtcaaagacgagcaaccttctaataaagtcgcttcaaatgtgaaaaaaaaaaaaaaa

SEQ ID NO: 4025 - DNA, 2472 bp, Rattus norvegicus
  Genbank Accession No. NM_145724
gaactaaaaagatcgtgtgcgcggatgtgctgtgtctgtagtgactttttccgggcctcttttttgggagaaggtaccagtctgcctcggtgaggcagaaaaggtccgtgatgccattgggctttgcccttctagaaaacaagctctagctggacggtccagaggctccaatggctgcgggctctggggtcgccccgccacctctcggcgttgggctttgtgcggtgaaagtggaggaggactctcccgggagtcaggagccctccggttccggagattggcagaatcccgaaacttctcgaaaacagttcagacaattgcgctaccaggaagtagccggccctgaggaggcgctgagccgactttgggagctctgtcggcggtggctgaggccggagctgcgctccaaagagcagatcatggagctactggtgctggagcagtttcttaccatcctgcctcgggagctccaggcctacgtgcgggaccactgccctgagagcggggaggaggctgcggctttggcgcggactctgcaaagagcactggacggggcctccctccagagctttgcaactttcaaggatgtggctgaatctctgacctgggaagagtgggagcagctggctgcagctcggaagggtttctgccgagagagcacaaaggaccctgggagtacagttggccctggcttggaaaccaaagctgtgaccacagacgtgattctaaagcaagaaatgtcaaaggaggcagagtcccaggcatggctacaagaagtgtcccagggaaaggtcccagtatttaccaaatgtggtgatacctgggaggactgggaggaacggcttccaaaagctgccgaattgctgccgctccagagttctcctgaagagcaaggacgcactgccatcccgcatctccttggcgtgtccaaagatgaaagcgattctaaagataatgaatttgagaacagcggcagcttggtccttggtcagcacatccagacagcagagggtctggtcaccaatggtgaatgtggggaggatcacaaacaaggcttacatgcgaaatgccacacggtgaagcctcacagctctgttgacaatgctttggggcttcttgagagccagaggcatttccaagaaggcagaccttataagtgtgataactgcgagaagagattcagacagcgctcagacctcttcaaacaccagaggactcacacaggtgagaaaccctatcagtgccaagaatgtgggaaaagcttcagtcagagtgctgccctggtgaaacaccagcggacacacacaggtgagaagccatatgcatgcccagaatgcggggaatgcttcaggcagagctcacacctcagtcggcatcagagaacccatggcagcgagaagtactgtaaatgtgaggagtgtggggagatctttcatatctccagcttatttaaacatcagagactgcataaaggggagagaccacacaagtgtgaagtctgtgagaagagctttaaacagcgctcagacctctttaagcaccagagaatccatacaggagagaagccctacatgtgctttgtctgtgagagaagattcagtcagagtgcaaccctcattaaacaccagcgaactcacactggagaaaaaccttataaatgttttcaatgtggcgaaagatttagacagagtacacaccttgtccgacaccaaagaatccatcacaattcagtctctgggcttagggtggagaagcaacatggtaacctcctgagctggtgaccctctggatgcaaagaatggaaatgccccattcgcctagcgcactgacccatcgagggagaaattgacccctccacagctgcagtttatgcgccaggtacaactagcccagtggcagaaaacactgccacagcggcggacctggaacatcgtgaccccccccccccccgggcatcggggccctggtgttagctatttatggttacaccttctactcagtggcccaggaacatttccttgatgagctggaagatgaagccaaagatgcccgagcccgagctcttgagagagagagagagcatcaggaccctaactgtacggaccatcctgaaactgctggagcccccgtacatgttgaatgatgcctggtggtctcacagcatcactggcataggaactgtggactatgattgagcccaagaagccacagactatgcatttggctactgccaaggggagattgctcacgtcacatgcagtttgtacatttactcagcccctttttatttccttgtttgagaggtatgcacgaccttgcctttccccaaactctgtggtttacctcttcacctcccaggggcccaactgttaagggggagggtgtggcctaactgcagagttggaaccaaagtgggaaagatagggtcaagtaaagagtaattaaaaaaaaaaaaaaaaaaaaaaaaaaaaa

SEQ ID NO: 4026 - DNA, 1006 bp, Rattus norvegicus
  Genbank Accession No. NM_145771
ctctcaggatgaaggtgacggtgggcccggacccttccctggtctaccgacctgatgtggacccagaggtggccaaagacaaggccagcttccgaaactacacgtcaggtccgctgctggatcgtgtctttaccacctacaagctcatgcacacgcaccagacagtggacttcgtcaggagcaagcatgcccagtttggaagcttctcttacaagaaaatgacagtcatggaagccgtggatatgctggatgatctggtggacgaatctgacccagacgtagayttccccaactcctttcacgcgttccagaccgcggagggcatccgaaaagcccacccagacaaggactggttccatctggttggacttttgcatgatctggggaaaatcctggccctgtggggggaacctcagtgggctgttgttggagacactttccccgtgggctgccgtccccaggcctccgtggtgttctgcgactctactttccaggacaatcctgacctccaggaccctcgatacagcacagaacttggcatgtaccagccccactgtggacttgagaatgtccttatgtcctggggccatgatgagtacctataccagatgatgaagttcaacaagttctccctaccttcagaggccttctacatggtccgattccattccttctatccgtggcacaccggcggtgactaccggcagctgtgcagtcagcaagacctggatatgctgccttgggtgcaagagttcaacaagtttgacctctataccaagtgccctgacctaccggaagtgaagagcctgcggccctactatcaggggctgattgacaagtactgcccgggcatcctgagctggtgaatggtttctaataccttctctctcactgctgaggggcaccaaggctggacaacttcagggacaataatagcccatgccacctggccacagtccccacccatcacagttgaggtcacttttgcctggctatcaataaagca

SEQ ID NO: 4027 - DNA, 1405 bp, Rattus norvegicus
  Genbank Accession No. NM_145774
gaattcccagggcaagctccaggctccgcaagacccgcgggcctccaggatgcagacaccgcacaaggagcacctgtataagctgctggtaatcggcgacctaggtgtaggcaagaccagcatcatcaagcgctacgtgcaccaaaacttctcctcccactaccgggccaccattggtgtggacttcgcgctgaaggtgctccactgggacccagagacggtggtgcgcctgcagctctgggacatcgcaggtcaagaaagatttggtaacatgacaagagtctattaccgagaagctatgggagcatttattgtttttgatgtcaccagaccagccacatttgaagcagtggcaaaatggaaaaatgatttggactcaaagttaactctccctaatggtaagccagtatcagtggttttgttggccaacaaatgtgaccaagggaaggatgtgcttgtgaacaatggactcaagatggaccagttctgcaaggagcatggtttcgtaggatggtttgaaacatcagccaaggaaaatataaacattgatgaagcgtcaagatgcctggtcaagcacatacttgcaaatgagtgcgacttcatagagtctatagaaccggacattgtgaagccccacctcacatcacccaaggttgtcagctgctctggctgtgccaaatcctagaaggcacctctgctggcatatgacagaaagaacccgtggccctcatgaatcgtgcttcagtttttccttatccattttgggtaagcatcaggatagggaagcacacgtgacaagccaaagataatatgactctatgtttcctgtcaaagaggaacagcaaatgttctttatgtgtttttccccaccgtcagcacagtgtttacaagcttttaaaatattagtctgttgcaatatgctgttttatcactgagcaaagtcactcagggacacagacagccttggtattcattcctttaaatcaacaaaagcttctggtcttcttgagaaggggactaagagagcaaggcagaggtcaagctaagtgtggggatttatcttgccctggtgcgtctttgttcaggtatcaatttgttcctgggtggtctgataggtctattaaataggaacactattttttccattcatggcagacctaagggttgcctgtgatgtttctcttcagagtcgtgtgcacaggcagcctgggcttttgttgttacttgctgtgccctgaatgctggtttaactggaaactgtatggaaagatctgctccctgtatgtgcctttctttcagctttctctgactcaaactgcgggactgctctgtacatgtaagatatattatatatatttttcacaagtgaaaaataaaacattaaaagtgttctttcccggaattc

SEQ ID NO: 4028 - DNA, 2005 bp, Rattus norvegicus
  Genbank Accession No. NM_145782
tgcaagactgtcagctgggaaggaaacttggaggcctgaactgctgaaggagagctaagatggagatcattcccaacctttctatagagacctgggtgcttctagctactagcttgatgctcttctacatatatgggacctattctcatggcctgtttaagaaactaggaattcctggacccaaacctgtgcctttatttggcaccattttcaactacggtgatggcatgtggaaatttgatgatgactgctataaaaagtatggaaaaatatgggggttttatgagggcccacagccttttttggctatcatggatccagagatcatcaaaatggtgctggtgaaagaatgttactcagtcttcacaaaccgtcggtgttttgggccaatgggatttatgaaaaaggccattaccatgtctgaggatgaagaatggaagagacttcgaacaatcctgtctccaaccttcaccagtggcaaactcaaggagatgttccccctcatgagacagtatggagatacattgttgaagaacttgaggcgagaagaagcaaaaggggagcccatcaacatgaaagacatctttggagcttatagcatggacgtgatcactggcacatcatttggagtgaacgtcgattccctcaacaatccacaggatcccttcgtgcagaaagccaagaagatcttaaaatttcaaatttttgatccatttcttctctctgtagttctgtttccatttcttactccaatatatgagatgttaaatttttcaatttttccaagacagtcaatgaactttttcaaaaaattcgtaaaaacaatgaagaaaaatcgccttgattcaaaccagaagaaccgagtggattttcttcaactgatgatgaatactcagaactccaaaggccaagagtcccagaaagctctttctgatctagaaatggcagcacaagctattattttcatttttgggggttatgatgccacaagcacctccatttccttcataatgtatgaactggccactcgccccaatgtgcaaaagaaactccagaatgagattgatagagctctgcccaataaggcacctgtcacctatgatgctctgatggaaatggagtacctggacatggtggtgaatgaaagtctaagattgtacccaattgctaccaggctagacagagtctcaaaaaaggatgtggaaatcaatggagtttttattcccaaagggactgtagttacgataccaatctatcctcttcatcggaaccctgagtactggctagagcctgaggaattcaaccctgaaaggttcagcaaggagaacaagggcagcattgatccttatgtatatctgccctttggaaatggacccaggaactgcattggcatgaggtttgctctcatcagcatgaaacttgctgtcataggagtcctgcagaacttcaatatccagccttgtgagaagacacagatccctctgaagatcagtaggcaaccaattttccaaccagaaggacccatcatcctaaagcttgtgtcaagagattaaacccagatttggacagtgaatttccctcaggaaccatgttataatcttcaaggagactgtttcacagaacaccagagaatttaattaacattagaataagagcaatataatataggcttcatcaattttcctcgattactgagtattcagaaattcactgaacaggctcagtggctctgcggtgtatcatctattttatgattcaaagaaaattattaactcaatggtagatgtggaggttcatcatatgattcttgtggaccatctatacagattccagttagttccatcagttctgtattctaactgcagtagctgtttctctagagttctatcaatagaaactgttgtattgacagttagtaaatgtgtagcaaattttctctttgtaaaaatatatgatattaagaatataaataaatatatctttcatgaaaaaaaaaaaaaaaaaa

SEQ ID NO: 4029 - DNA, 600 bp, Rattus norvegicus
  Genbank Accession No. NM_145783
gtggtcgccgtcatgctcgccgctgccctccgtcgctgtaccgcagccgcggccgcccgaggccttctgcaccccgtctcggctcccagccccgctgccgctgtctgttccattcgctgctattctcatgggtcacatgagacagatgaggagtttgatgctcgctgggtgacatacttcaacaagccagacattgatgcctgggagttgcgtaaagggatgaatacacttgttggctatgatctggttcctgagcccaaaatcattgatgctgctttgagggcatgtagacggttaaatgattttgctagtgctgttcgcatcttggaggttgttaaggacaaagcaggacctcataaggaaatctacccctatgtcatccaggaacttagaccaactttaaatgaattgggaatctccactccagaggaactgggccttgacaaagtgtaaactcccttcgatgggcttcccaaggacttaactgctattgctacttgattgaaacagttgcctggaaatgttttatttgaacaaattttcctttgagtatcaaaccatgtaacttggactttaataaagggaaatgagtttgacccg

SEQ ID NO: 4030 - DNA, 2451 bp, Rattus norvegicus
  Genbank Accession No. NM_145784
ggcacgagtggaggcggacccagctgccagctgcctctcttaattccacacagtccttaggtccctcgccctcacctctctgaggcagctgtgccctgctttcctggccatgcggtggctgtggcccctggctgtctctcttgctgtcgtgttggctgtggggccgagtgaggtctctggggctgccaccttatctttgggtggtcatagagccaaggtccaggagcagcagagtcgaccccgaagaggtaccaaggatgaggggcccaaggaggtacagcactatgtacctgaggagtgggctgagtaccccaagcccatccaccctgctggcctgcagcccaccaagcctttggtggccactagccccaacccagacaaggatggggccacctcagagagtggacaagagctgaggaccaacctgaccgggacaccaagtcagaggctgcagattcagaaccccctgtatccggtgaccgagagctcctatagtgcctatgccgtcatgctcctggctctggtggtatttgctgtgggtatcgtgggcaatctgtctgtcatgtgcattgtgtggcacagctactacttgaagagtgcctggaactctatccttgccagcctggctctctgggatttcctggtcctcttcttctgcctaccaattgtcatcttcaatgagatcaccaagcagaggctacttggggatgtttcttgccgagcagtgcccttcatggaggtctcctccctgggagtcacaaccttcagtctctgtgccctgggcatagaccgattccatgtggccaccagcaccctgccaaaggtgagacccattgagagatgccaatcaatcctggctaaactggctgtcatctgggtgggctccatgatgctggctgtgcctgaactcctgctgtggcagctggcacaagagcccactcccaccatgggaactgtggactcatgtatcatgaaaccttcagctgacctgcccgaatccctctattcgctggtgatgacctaccagaatgcccgcatgtggtggtattttggttgctacttctgtctgcccatcctcttcaccgtcacctgtcagctggtgacatggcgggtgcggggcccaccgggcaggaagcctgagtgtagagcgggcagacatgagcagtgtgagagtcagcttaacagcaccgtggtgggcctgactgtggtctatgccttctgtacgctccctgaaaacatctgcaacatcgtggtggcttacctctccactgagctcacgaggcagaccctggacctcctgggcctcatcaaccagttctccacgttcttcaagggcgccatcactcccgtgctcctcctgtgcatctgcaggccgctaggccaggccttcctggattgctgctgctgttgctgctgtgaagaatgtggtggggcatcagactcctcagccactgtcagcgcggacagcaagcttaaggccgaagtgtcctcctccatctacttccacaagcccagggagtcgcccccactcctgcccctgggcaccccttgctgagcccatgggggaacaggagcaggcacagagcaggcaggggaggggggccatgccgatccatggcggtctgctgattctttcacatggtctcactttggcctctctctcatcctgctgtttagagatggacttggcttattttgtcaacgactgggcttttcaaagctccatctacaaacaatgctgttcttaccctcagagggacctgccagccttgtccttcccacttgtagatggagatctgtctagccgttagagttgcccagcatctccatctggccaccctcgagcccgggcaaggccttttgcctgttctccctttggtcttaggatctgactattggctgagcccctccatcatcatgatggatcctgtgttgatgagctccaactattgttggaccactatgatgtcgatgatcatttctctacttctacctagctccctatcctggaccaggcacttctaggggggctcacctaaccaagcccaggattccattttttttttttttggttctttttttcggagctggggaccgaacccagggccttgcgcttcctaggtaagcgctctaccactgagctaaatccccagccccccattttttttttggttctttttttcggagctggggaccgaacccagggccttgcgcttcctaggtaagcgctctaccactgagctaaatccccagccccaggattccattttctaaagtgggtctgtcttagccctgaatgtcccttcccttttcccagaggagtctctcacttctgtcttccgttcttagaggtactgcggttgcattgcctgacccctgcctcccgttaggtgctttcctgtagaaggccattctggaaaaacaataaagtaggtacaacaaaaaaattaa

SEQ ID NO: 4031 - DNA, 1265 bp, Rattus norvegicus
  Genbank Accession No. NM_145790
gcacgaggttttgggttaggtgagatgagggtgatcctcggtagaaacaaaacctgtcattcacagtgagtaagagccctgagaatgagccagaagcaggccatgtgctttttcctttacagttcctgctcttgctttcctacttccaaaagagctccgtgctgaatcttctttgggcagcagagggtgaagaggacgtttccagggttctgataggtccattggcgtgtgtccagtcctagcactgtcgttctggtggtgcccattgcattccgtggtgttttcagaatccgtttcaggagagagttgttgtagttttctttcaacaccattacctcagcttgctggcatttcccatcagccaccagtactgatggaaagtcaacccagattagactactctccactagcccagctttatggggccatccatttgccaaaaggataatagaagcagaccctggatgtaagacagggaacataaaaaaataatttgataatttaaaaggagtgatgggggatggctcagcagctaagagcactcgtttacaaatttggttctagcacccacatggcagctctcaactctctgtaacactagtcccagctgatctgacaccccccttttggcctccacaggcaccaggcaagcacatagtacacagaccttccatgcaagcaaccatccatacatagaacacctaataactatttttaagagcaaatgacatttcttgtagtgagtaatcttggtgtgaacagtacacactacttataagaaatatcttggttgctatgagaactatctctcatgtattcttttcaaactacacatcatttaatctgttcattattaaacaataaattggtcgtggcccttctcttcggccccaggtcattgctccccttgcagcttgttcataaagttattggggcttctccaactgaggtgtggatttgcatgggattgtacagtttgtgtgggagctgcacacttaagttgcccagtgtgggccaccatgtgcattccttcagttggcctttagaaggcctcacagactttggctcaccatgcatgagaccattgaagaggcactgggagggggctggagagatggctcagtggttaagggcactgactgctcttctagaggtcctgagttcaaatcccagcaaccacatggtggctaacaaccatctgtaatgggatccaatgccctcttctggcgtgtctgaagacagctacagtgtacttatatattaat

SEQ ID NO: 4032 - DNA, 1038 bp, Rattus norvegicus
  Genbank Accession No. NM_147136
ggctgctaggcgccggccgaggcgaggcgccgcgcggaaaaccgcggcccggggggcggacccggcgggggaacaccgacgcggaggttccccccacacgcgcgggacacgcccgcccgcccccgccacgcacctcgggagaggcgatgggggggtggagcgaggccccgcggggaggggacccgcgccggcacccgccgggctccccgggagcggccgcgacgcccgccgcagctgaggcgatccacgggaagggcccggctcgcgtccagagtcgccgccgccgccggcccccccgagtgtccgggccccccgccccaccgggggcccgctggttcctcccgctccggaacccccgcggggttggacccgccgccccggagcccgcgccgcgcgccgacccccgacccgccccccgacgggaagaaggaggggggaagagaggtggcgacgacgcgggggacgacggggccccgcggggaagaggggagggcgggcccgggcggaaaggacggggggtctccccggacgtgggagagggcggcggcgcctcgtccagccgcggcgcgcgcccagccccgcttcgcgccccagcccgaccgacccagcccttagagccaatccttatcccgaagttacggatccggcttgccgacttcccttacctacattgttccaacatgccagaggctgttcaccttggagacctgctgcggatatgggtacggcccggcgcgagatttacaccctctcccccggattttcaagggccagcgagagctcaccggacgccgccggaaccgcgacgctttccaaggcacgggcccctctctcggggcgaacccattccagggcgccctgcccttcacaaagaaaagagaactctccccggggctcccgccggcttctccgggatcggtcgcgttaccgcactggacgcctcgcggcgcccatctccgccactccggattcggagatctgaacccgactccctttcgatcggccgagcctctgtcaagtcttggaccaagtaaaaat

SEQ ID NO: 4033 - DNA, 1496 bp, Rattus norvegicus
  Genbank Accession No. NM_147138
  misc_feature (1)..(1496): n = a or c or g or t
accatggcggacgcggagaaaaacgctgttgcggagaaaaacgctgttgcggaggaaaacgccgttgcggaggaaaacgccgttgcggataaaaacgcaacgaaagaggttctggctgaggcagcaagcgttctggaacctgtaggattgccggaagaagcagagctgcctgccaagatcatggaggaatttatgaggaactctcggaagaaagacaagctgctctgtagccagcttcaagtagtgaacttcttacagacttttctggcccaggaggataatactgaccagaacccagatgctctggcttctgaagatacaagtcgacaaaaggcaactgaaactaaggagcagtggaaggagctgaaggcaacatacatggatcatgtggacgtcatcaaatgtgccctgtctgaggccttgccccaggttaaagaggcacacaggaagtacaccgagcttcagaaggcttttgagcaactcgaggctaagaagcgagtccttgaggagaaactgcagttagctcagaagcagtgggtgctgcagcagaagcgtttgcagaatctgacaaagatttctgctgaggtcaagagacgccggaagagagctctggagaagcttgatggttctcaccaggaacttgaaaccttgaagcagcaagcaggacaggagcaggagaagctgcagaggaaccagagctacctccagctgctgtgctccctgcagaataagctggtcatctctgagtccaaggccgacgacaaagatgtcaaagggcccgcccttccacccaagtctccgtaaagatgaaagcgagaagagagctgcgctccagctgtgctgcttgggctgagaccagagtggttccttcgctgttgtatccctaggcctangcctgtagccttgtacaatcttccaagcggactcaggtttggcatctcttggcttctcagtgaattgttctgtttcatttcttaccatatattctggcttgttctgtcttcacctgggtccaacttgctgtttctgtaaaattgtgccagtgaaattgtcacgtgcatgcacgcaggcacacaggcacgcatgccacaaccacccttttctctcgctgatcttcagtagtctctcctctggccctctctctctctgtcttctctcccgaccagatgtgaaagtaactttatgcacccgatgtaattgttgcctcggaggctcattgatgaataagctcaccctgtgtagttcttgctaaactctggctggctggttcaactcagctcttctggttcaaacccgtctccaaactgactgattgaaacaggcctctcttggcttggaaagtctgctctgaactccagaactgaacggtactgactgcactgactcgactgaacgcaactgcaccgagttgattgactccttctccctttactgctcttaagtaccctctcttccctgtgctgtcctcctgagtcatgctgccaaatcctcgtgcc

SEQ ID NO: 4034 - DNA, 2101 bp, Rattus norvegicus
  Genbank Accession No. NM_147206
agcagccttatatgtatcaagatgcattttattaagtcttcatgggtatctggggaagaataaattgtttgtttggcctgagcaccaattagtgtccacatctctgagaaagaacatggatctacaactatccgtgaaagcccaatgcatgggggcaacatcaattagtactcgtgccgaattcggcacgaggggagctcagcacgttcagccctgcaaagggcagtacacaaaattgagagtaaagctcgaagagagacttgtttaaagaaaacggcaatggatttgatcccaaacttttccatggaaacctggctgctcctggttatcagcctggtgctcctctacctatatggaactcattcacatggaatttttaaaaagttgggaattcctgggcccaaacctttgcctttcttggggacgattcttgcttacaggaagggcttctgggaatttgacaaatactgccataaaaaatatgggaaattatgggggttgtacgatggtcgacagcctgtgctagcgatcacggatccagacataatcaaaacagtgctggtgaaggaatgttactctaccttcacaaaccgacggaactttggtccagtgggtattttgaaaaaagccatctccatctctgaggatgaagaatggaagagaattcgagccctgctgtctccaaccttcaccagtgggaagctcaaggagatgttccccatcattaaccagtatacagatatgttggtgagaaacatgaggcagggatcggaggaaggcaagcccaccagcatgaaagacatctttggggcctacagcatggatgtgatcacagccacctcatttggagtgaatgttgattcccttaacaacccacaggacccttttgtggaaaaagtcaagaagctcttaaaatttgatatctttgatccattgttcctctcagtgacactttttccattccttaccccactatttgaagcactaaatgtctccatgtttccaagagatgtcattgacttttttaaaacttcagtagaacgaatgaaagagaatcgcatgaaagagaaagaaaagcaaagaatggactttcttcagctgatgataaactcccagaattccaaagtcaaagactctcataaagcattatccgatgtggagattgtggcccagtcagttatcttcatttttgccggctatgagaccactagcagtgctctttcctttgttttgtatttgctggccattcaccctgatatacagaagaaactgcaggatgaaattgatgcagctctccccaataaggcacatgccacctatgataccctgctacaaatggagtatctagatatggtggtgaatgaaaccctcagattatatccaattgctggaaggcttgagagggtctgtaagacagatgttgaaatcaatggggtgttcattcccaaagggactgtggtgatgataccaacctttgctcttcacaaagacccgcattactggccagagcctgaggaattccgccctgaaaggttcagcaagaagaatcaggataacatcaatccttatatgtacctgccctttgggaatggacccaggaactgtattggcatgaggtttgctctcatgaacatgaaagttgctcttgtcagagtcctgcagaacttctccttccaaccttgtaaggaaactcagatccctttaaaattgagcaaacaaggacttcttcaaccagaaaagccactgcttctaaaagttgtgtccagagatgagactgtgaatggagcttgatgtagaatggcctatagtggtgttgtatcacatggaccagaaaccagttcatattgtgaatgaatccagagatgaagattgcagtaattttgttcactcctgggggttttgggtgttctttgagctttctcagcctctgtgcaagttgttttctgtggaacataaggatctaatgacataaatccaagataaatatattcaactcgtggttcttgtgggatggcctatgttaccttcattgttaccaccaaatactctgatttctgatgagaaaataaataaacatcaattactagttctatcaccatta

SEQ ID NO: 4035 - DNA, 1629 bp, Rattus norvegicus
  Genbank Accession No. NM_147209
atgggtgcctacctctctcagcccaacacggtgaagtgctccggggacggggttggcgccccgcggctcccgctgccctacggcttctccgccatgcaaggctggcgcgtctccatggaggatgctcacaactgtattcctgagctggacaatgagacagctatgttttctgtctacgatggacatggaggggaagaggtcgccttgtactgtgccaaatatcttcctgatattatcaaagatcagaaggcctacaaggaaggcaagcttcagaaggctttacaagatgccttcttggctatcgatgccaagctgactacagatgaagtcattaaggaactggcgcagattgcagggagacccactgaagatgaggatgataaagaaaaagtagcagatgaggatgatgtggacaatgaggaggctgcattgctgcatgaggaggctaccatgactattgaagagttgctgacacgatatgggcagaactgtcagaagggccctccccacaccaaatctggaactgggataggtgatgaaccagagccccagggcctcaatggtgaggctggacctgaggacccatctagggaaactccttcccaggaaaatggccccacagccaaaggccacacaggcccttcctccaactcagaccatgggactgaggcaggccaaattggtgagcccggtactgctactggtgaggctggaccttcctgctcttcagcctctgacaagctgcctcgagttgctaagtccaagttctttgaggacagtgaggatgaatcagatgaggtggaggaggaagaggatgacagtgaggaatgtagtgaggacgaggacggctacagcagtgaggaggcagagaacgaggaggacgaggatgacacggaggaggctgaagaggatgacgatgaagagatgatggtccctggaatggaaggcaaagaggagcctggctctgacagtggcacaacagcagtggtggctctcatacgagggaagcagttgattgtggccaatgcaggagactctcgctgtgtggtgtctgaggctggcaaagctttagatatgtcctatgaccacaaaccagaggatgaagtggagctggcacggatcaagaatgctggtggcaaggtcaccatggatggacgagtcaatggaggtctcaacctctccagggccattggagaccacttctacaagagaaacaaaaacttgcccccccaggaacagatgatttctgcccttcctgacatcaaggtgctgactctcactgatgaccatgaattcatggtcattgcttgtgacggcatctggaatgtgatgagcagccaggaagttgtagactttattcaatcaaagatcagccaacgtgatgaaaacggggagcttcggttattgtcatccattgtggaagagctgctggatcagtgtctggccccagacacttctggggatggtacagggtgtgacaacatgacgtgcatcatcatttgcttcaagccccgaaacacagtagagcttcagccagagagtggcaagaggaaactggaggaggcactctccacggagggggctgaagagaatggcaacagtgacaagaagaaggccaagcgggactag

SEQ ID NO: 4036 - DNA, 878 bp, Rattus norvegicus
  Genbank Accession No. NM_147214
ggcacgagcagagagattgtcccaacagagaggcaattctattccctaccaacatgaagctgttgctgctgctgctgtgtctgggcctgacactggtctgtggccatgcagaagaagctagttccacaagagggaacctcgatgtggctaagctcaatggggattggttttctattgtcgtggcctctaacaaaagagaaaagatagaagagaatggcagcatgagagtttttatgcagcacatcgatgtcttggagaattccttaggcttcaagttccgtattaaggaaaatggagagtgcagggaactatatttggttgcctacaaaacgccagaggatggcgaatattttgttgagtatgacggagggaatacatttactatacttaagacagactatgacagatatgtcatgtttcatctcattaatttcaagaacggggaaaccttccagctgatggtgctctacggcagaacaaaggatctgagttcagacatcaaggaaaagtttgcaaaactatgtgaggcgcatggaatcactagggacaatatcattgatctaaccaagactgatcgctgtctccaggcccgaggatgaagaaaggcctgagcctccagtgctgagtggagacttctcaccaggactctagcatcaccatttcctgtccatggagcatcctgagacaaattctgcgatctgatttccatcctctgtcacagaaaagtgcaatcctggtctctccagcatcttccctaggttacccaggacaacacatcgagaattaaaagctttcttaaatttctcttggccccacccatgatcattccgcacaaatatcttgctcttgcagttcaataaatgattacccttgcactt

SEQ ID NO: 4037 - DNA, 1003 bp, Rattus norvegicus
  Genbank Accession No. NM_147215
tgggcaccatcagcagagagattgtcccgacagagaggcaattctattccctaccaacatgaagctgttgctgctgctgctgtgtctgggcctgaccctggtctgtggccatgcagaagaagctagtttcgagagagggaacctcgatgtggacaagctcaatggggattggttttctattgtcgtggcctctgataaaagagaaaagatagaagagaacggcagcatgagagtttttgtgcagcacatcgatgtcttggagaattccttaggcttcacgttccgtattaaggaaaatggagtgtgcacagaattttctttggttgccgacaaaacagcaaaggatggcgaatattttgttgagtatgacggagaaaatacatttactatactgaagacagactatgacaattatgtcatgtttcatctcgttaatgtcaacaacggggaaacattccagctgatggagctctacggcagaacaaaggatctgagttcagacatcaaggaaaagtttgcaaaactatgtgtggcacatggaatcactagggacaatatcattgacctaaccaagactgatcgctgtctccaggcccgaggttgaagaaaggcctgagcctccagattgcagggcaagatctatttcttcatcctttgttctatacaatagagtgcctctctgtccagaagtcaatccaagaagtgcttaatgggttcctttattctttcttcctggattactccgtgctgagtggagacttctcaccaggactccagcattaccatttcctgtccatggagcatcctgagacaaattctgcgatctgatttccatcctgtctcacagaaaagtgcaatcctggtctctccagcatcttccctagttacccaggacaacacatcgagaattaaaagctttcttaaatttctctttgccccactcatgatcattccgcacaaatttcttgctcttgcagtgcaataaatgattacccttgcactt

SEQ ID NO: 4038 - DNA, 1491 bp, Rattus norvegicus
  Genbank Accession No. NM_148891
atggcggatgagagtgagacagcagtgaagctgccggcaccttcgctgccactgatgatggaagggaatggaaacggccatgagcactgcagcgattgcgagaacgaggaggacatcagccacaacaggggtggcttgagtccagccaatgacactggagccaaaaagaagaaaaagaaacaaaagaagaagaaagagaaaggcaacgacatggattccacccaggatcagcctgtgaagatgaactctttgccagcagagaggatccaggaaatacagaaagccattgagctgttctcagtgggtcaggggcccgccaaaaccatggaggaagccagtaaacgaagctaccagttctgggatacacagccagtgcccaaattaggtgaagtggtaaacacccatggccctgtggaacctgacaaagacaacattcgccaggagccctacaccctaccccagggcttcacttgggatgccttggacctgggagaccgtggtgtgctaaaagaactgtacaccctcctgaacgagaactatgtggaagatgacgataacatgttccgattcgattattccccagagtttctcttgtgggctctccggccaccaggctggctcccacagtggcactgcggggtccgagtggtctcaagtcggaaactggttggattcatcagtgccatcccagcaaacatccacatctatgacacagagaagaagatggtggagatcaacttcctgtgtgtccacaagaagctacgctccaagcgggtggctccagtcttgatccgagagataacccggcgggtccacctggagggcattttccaagctgtttacactgccggcgtagtgttgccaaagcctgttggcacctgcaggtactggcatcggtccctgaaccctcggaagctgattgaagtcaagttctcccacctgagcagaaacatgaccatgcagcgcaccatgaagctgtaccggctgccagagactcccaagacagctgggctacgcccgatggaaaagaaggacattccggtagtgcaccagctgctcagcaggtacctgaagcagtttaacctcacccccgtcatgaaccaggaggaggtagagcactggttctacccccaggagaacatcattgacacttttgtggtagagaatgccaatggtgaggtgactgatttcctgagcttttatacacttccttccaccatcatgaaccatccaacccacaagagtctgaaagctgcatactccttctacaacgtccacacccagacccctcttctagacctcatgagcgacgccctcgttctagccaaaatgaaagggttcgacgtattcaatgcactggatctcatggagaacaaaacattcctggagaagctcaagttcggcataggggacggcaacctgcagtattacctgtacaattggaagtgcccgagcatgggggccgagaaggttgggttggtgttacagtaa

SEQ ID NO: 4039 - DNA, 835 bp, Rattus norvegicus
  Genbank Accession No. NM_148892
cgcggctgagcctggccgctccgagtagcgccatgtccaagccacctcccaaaccggtcaaaccagggcaagttaaagtcttcagagctctatatacgtttgaaccgagaactccagatgaattatacttcgaagaaggagatattatctacatcactgacatgagcgacaccagctggtggaaaggaacatgcaaaggcagaacaggactgatcccaagcaactatgtggctgagcaggcagaatccattgacaatccattgcatgaggctgcaaaaagaggcaacttgagctggctgagggagtgcttggacaaccgagtgggcgtgaatggcctggacaaggctggaagcacagccctgtactgggcctgccacggtggccacaaagacatagtggaggatctgtttactcagccgaatgtggaactgaaccagcagaacaagctgggagacacggctctgcacgcagctgcctggaagggttatgcagacattgtccagttgctactagcaaaaggcgcgaggacagacttgagaaacaatgagaagaagctagccttggacatggccaccaacgctgcctgtgcatcgctcctgaagaagaagcaggcaacagatggggctcgaacgttaagcaatgctgaggactacctcgatgatgaagactcagactgatgcctcctggagctgctttgatgcctaaacttcttttgcttttgccattccaaaacctgggttgatttgccagaagagtattgataattgatccttttaccgactgtatgagcacggcatggctacactgtgacctatgatgagtgtgcgtgagcgta

SEQ ID NO: 4040 - DNA, 2949 bp, Rattus norvegicus
  Genbank Accession No. NM_152242
agacagcgtgatcccggcctcccacgaaggcagctcttactaaccagggaagagatgccaaaagtccacggaggctgaagaccctgtaaagcttcgccagaaaacctaggagtgttcgagggcacttggcaccggaagctagacctgtaggcggagcctcacctgggttgagttcacagctgcctagacaggctcagactaggtgctgggcacctggaaggaggaggcagaggcaccagcagtaaagcctatctatcaacagaagggcctgcctaggcttggaggtataatggctgtccaggtgctactgcagatggtctacttcctactgactctgctctttctggtgcaaggtgcccatggtgccagcccccgagaagacttccgcttctgtggccagcggaaccagacccaacagagcaccctccattatgatcaaacttcagagcctcacatttttgtatggaacacagacgagagcctcacgatccgtgccccattcccggcagccccagacattccctacttcttcccggaacctagaggactctatcatttctgcctctactggagccgccacactgggaggctccacctgcgctatggcaagaatgattacctgcttagtagccgagcctccaacctcctctgctaccggaaacaggaggagagcctgaaacagggggctccactggttgccacctctgtcagctcctggcagagcccacagaacaccagcctgccgggagctccaagcttcatcttctccttccacaatgccccacacaaggtctcccacaatgcatctgtgaacatgtgtgacctcaagaaggaactgcagttgcttagcaagttcctgcagcatcctcacaaggcctccaagcggccctccgcagcgttcatcagtcagcagttgcagaacctggagtcaaagctgacctccgtgagcttcctgggagacacactgtcttttgaggagaaccgggtcaatgccacagtgtggaagctgccacccacagccgggctggaggatctgcaaatccactcccagcaggaggaggagcagagtgaggtccaggcctactccgtgttgcttccccgggccgtattccagcagaccagaggccgtcgccgggatgccgccaagaggctcctggtagtcgacttcagcagccaagctttgttccaggacaagaattctagccaagtcctgggtgagaaggtcttgggtattgtcgtgcagaacaccaaagtcactaacctctcagatcccgtggtactcaccttccagcaccagccacagccaaagaacgtgactctgcagtgtgtgttctgggttgaagacccggcatcaagcagcacagggagctggagcagtgagggctgtgagactgttagcagagacacacagacatcctgcctgtgtaaccatctgacctactttgcagtgctgatggtgtcatccatggaggtagaagccactcacaaacactacctcacgctcctgtcctacgtgggctgtgtcatctctgccctagcttgtgtcttcaccatcgctgcgtacctgtgcaccaggaggaagtcacgtgactacaccatcaaagtgcacatgaacctgcttctggccgtcttcctcctggacgtgagcttcctgctcagtgagcccgtggcgctgatgggctctgaagcagcctgtcgcaccagtgccatgttcctgcacttctccctgcttgcctgcctctcctggatgggcctggagggctacaatctctaccgactggtggtggaggtcttcggtacctatgtccctggctatctgctcaagctgagcaccgtgggctggggttttcctgtcttcctggtcactctggtggcgttggtggatgtgaataactatggccccatcatcctagctgtgcgccggactccggaccatgtcatctacccctctatgtgctggatccgggactctgtagttagctatgtcactaacctgggcctcttcagcctggtgttcctgttcaacatggctatgctggccaccatggtggtgcagatcctgcggcttcgcccacacagccagaagtggccccacgtgctgactttgctgggcctcagcctggtccttggccttccctgggccttggtcttcttttcctttgcttctggtaccttccagcttgtcatcatctaccttttcagcatcatgacttccttccaaggcttcctcatcttcctgtggtactggtccatgaggttccaggcccaaggcggtccctctcctctgaagaacaattcagacagcgccaagctccccatcagctccggcagcacctcttccagccgcatctaggccaccgccacacctcccctcccctttggggttgggggtgcacatgcatggcgtctgctcacattgtctgtggcctggtgctgtgcccagccttggttggttagtggcatactagagaaggccctggtccttgaaggggtaggactgttgctctggtaggtagatatcctagcttgccttggcgagtactgtggatacagcctacttttcaacccagcattctgaagaccaagacggcaccctctggtgacagtggccaagcttgatgctctcctgagaagtggtcttcaaatccctgtgggtgtatctgaagatactgggcttgcctgtcgtgaattctgtcttgctaacatacagtgaggggaccccccccgccccccacgaaagctctcacgaagtcctggagctttaggcatggggctgagaatccaggaggacttcctgcaggaggcagcgtttcatcttgacctcagccttctagttggggaggaggatgttcttttttaaagaccagttcatttgtcttttgatattaaagctctttgtagagagtttggaaactgtaggagattgttgagaagaaaaataaaaatcag

SEQ ID NO: 4041 - DNA, 976 bp, Rattus norvegicus
  Genbank Accession No. NM_152935
gtctggactgcagacaggcggcacggagagaccggcgagctccgatcggtcggagctaaccgctgccaggcggctgccgcggccccgcacacgccccagtcgagcgaagatggtgggccggaacagcgccatcgccgcggggctgtgcggtgccctcttcatagggtactgcatctactttgaccgcaaaaggcgaggtgaccccaacttcaagaacaggcttcgagaacgaagaaagaaacagaagcttgctaaggagagagctgggctttccaagttacctgatttaaaagatgctgaagctgttcagaaattcttccttgaagagatacagcttggtgaagagttattagcacaaggtgactatgagaagggtgtggaccacctgacaaatgcaatcgctgtgtgtggacagcctcagcagttgctgcaagtgttacaacagactcttccaccaccagtgttccagatgcttctgaccaagcttccaaccattagtcagagaattgtcagtgctcagagcttggctgaggatgatgtggaatgagccagacaccaacatgataaatctcagtaaaatgataacagttagctgcaggctgctctgctcggggggataagggcaaactgtgcttgtcatgaactgtctcacactgacatctccaaagtgaacctgaactttggtagagccattgtctgttctatttatttttccagtgagaagtattttgatagcttttcattttataaatacactgcgttaaccaaaagatcatggatttcgtttgttcttgacatgcagttcaatgtaaatacagtagtattaggtagagactcctggtgattttaaaggattgaaaagctgaggaatagttgaataatgcacattttaaagactagaacattttattgtcgttgtaaaattgagtagaaacttgtgtttgtgaaaactgagcattaaaaccttacagagaca

SEQ ID NO: 4042 - DNA, 379 bp, Rattus norvegicus
  Genbank Accession No. NM_152936
tcagtttctgaagagaagcaccctgcacagttcttctgagttttggacctaggtctacaaccatgaaggtagcaattatctttcttctcagtgctttggccctgctcaatttagcaggtaacactacagctaaggtgattgggaaaaaggctaattgccctaatacacttattggatgccccagggattatgatcctgtgtgtggtactgacggaaaaacttacgccaatgaatgcattctatgctttgaaaacaggaaatttggaacatctatccgcattcagaggagagggctttgctgaatgtcctgatttcgaaatcttttagggctaccataatgtttagcaagaaggtttgctgaataaatgcatctgaacat

SEQ ID NO: 4043 - DNA, 1254 bp, Rattus norvegicus
  Genbank Accession No. NM_153303
caaggtgcgcgggtccgggcatgaagctgggccgggccactctggccctgctgctgctggtgccgtgcgtggttcgtgcggtggagcccatcagcctgggtctggccctagccggcgtactcaccggctatatctcctatcctcgcctctactgcctcttcgccgagtgctgcggccagaagcggagcctcagccgtgaggcgctgcagaaggatctggataacaagctctttggacaacaccttgccaaaagagtcatcttaaacgccgtgtctggtttcctaagcaacccgaagcccaagaagcccctcaccctctccctgcacgggtggacaggcaccggcaaaaacttcgctagcaagatcatcgcagagaatatttacgagggtggactgaacagtgactatgtacacctgtttgtggccacgctacacttcccccacgcctctaacatcaccctgtataaggaccaattacagatgtggattcgaggcaacgtgagcgcctgtgctcggtccatcttcatctttgacgagatggacaagatgcacgccagcctcatcgacgccatcaagcctttcctagactattacgacgtggtagatgaggtctcctatcagaaggccatcttcatcttcctcagcaatgcaggggcagaaaggatcacagacgtggctctggatttctggagaagtgggaagcagagagaggagatcaagctcagagacatggagcacgccctggccgtgtcggtcttcaataacaagaacagtggcttctggcacagcagcctcattgaccggaacctcatagactattttgtccccttcctgcccctggagtacaagcacctgaaaatgtgcatcagagttgagatgcagtcccgtggctatgaagaagatgaggacataatcaataaggtagctgaagagatgacgttcttccccaaggaggagaaggtcttctctgacaagggctgcaagactgtgttcaccaagctggactactacctggatgactgagccctgctgccaggtgctctgtagtccgctcctctccccacaagaggcttggacacttcctgctgaggctagcggggatcccatcaggggcggtttctgctctttggagcctgcaggtggccatgctgtagggaccacagatgcaacatggacctaaagctcctggagcctccaaaggacgaaaccagcttccagcctgcccattctgggctcatgatttttttaaaattat

SEQ ID NO: 4044 - DNA, 1742 bp, Rattus norvegicus
  Genbank Accession No. NM_153308
gaattcggcaggcgcaggccaagcaactcggccgtccagcgggtgcaggtgcggaccaccatcaccgcgcgcgcttgcagccaccgtagacaccggtctctggctccctagagcggggcagccacagaacccgaggccatgtaccatgaaaagagtttcttggtctctggggacagctatcctcccccaaaccctggctatcctgtggggccacaagcccctatgcctccctatgttcagcctccctaccctggggccccatacccacaggccgctttccagccctctccctatggtcaaccagggtatccccatggtcccggtccctatcacaaggtggttacccctcaaggacctactcaaggaggctacccaccagggccattacccacagagccccttcccccctaacccctatggacagccaccacccttccaggaccctggctcacctcagcatgggaactaccaggaggaagggcctccatcctactatgacaaccaggacttcccctcggtcaactgggacaagagcattcgccaggccttcatccgaaaggtgttcctggtgctgaccctgcagctgtcggtaaccctgtcgactgtggccattttcacttttgtcggggaggtgaagggctttgtccgggccaatgtctggacctactatgtctcctacgccatcttcttcatctccctcattgtcctcagctgttgcggggacttccggaaaaagcatccctggaaccttgttgccctgtcgatcctgaccatcagtttgtcctacatggtgggcatgatagccagtttttacaacacggaggcggtcatcatggccgtgggcatcaccacagctgtctgcttcacggtggtcatcttctccatgcagacccgctacgacttcacctcgtgcatgggcgtgctcctggtgagcgtggtggtgctcttcatcttcgccatactctgcatcttcatccggaaccgcatcctggagatcgtgtacgcctcgctgggcgctctgctcttcacctgcttcctggctgtggacacccagctgctcctggggaacaagcaactgtccctgagcccagaagaatatgtgtttgcggccctgaatctgtacacggacatcatcaacatcttcctatacattctcaccatcattggccgtagccaaggaataggacaagccccagctcaggtggcatggtgggctcagacccatgcccctgccatgacattgccatctgtgcttccccctctctggttcccagccatggcctggagcagagggagcccctctcgccctcgtgtatgtacactgcaaatacttaacgttcggaccctctctgccacagcatggaaacctttatcccttttgcccttgccaaggggtgacagggctgcatttctgtgccaccttctgtctactcattgttgcatgagccctgtctgccagcccatcccggggtctgggatcaacaccaggtcccaggggagaaggatcataccaagaggtgagggtgcacgtcttccctcctgtcccagctcccctggcatagagtccccatgtcccctcctcaccctgccttctgaggggcttgcagggtggggcctcgttcttgttctgggccccgagaccaagagagggtggcatgtttcaggggagaggctctcttgtgtgctgccattgtaaaatgccaataaaagggtatcttctgctaaaaaaaaaaaccgaattc

SEQ ID NO: 4045 - DNA, 1936 bp, Rattus norvegicus
  Genbank Accession No. NM_153312
ctgcagagtatcagaggcccagctagagggagaacaccgaggagtaatttgctgacagacaagcagggatggacctgctttcagctctcacactggaaacctgggtcctcctggcagtcatcctggtgcttctctaccgacttggaacccatagacatggaatttttaagaaacaaggaattcctgggccaaaacctctgccttttttaggcactgtgctgaattactacaagggcttagggagatttgacatggagtgctataaaaagtatggaaaaatatgggggttgtttgatggtcaaacgcctgtgtttgccatcatggacacagagatgattaagaatgtactagtgaaggaatgcttttctgtcttcacaaaccggcgggattttggcccagtggggattatggggaaagctgtctctgtagctaaggatgaggagtggaagagatatagagccttgctgtcccccacgttcaccagtggaagactcaaggagatgttccccatcattgaacagtatggagacattttggtaaagtacttgaagcaagaggcggagacaggcaagcctgtcaccatgaaaaaagtgtttggtgcctacagcatggatgtgatcaccagcacatcatttggagtgaacgtcgattcccttaacaacccaaaggatccttttgtggagaaaaccaagaaattgttaagatttgacttttttgatccgttgttcttgtcagtagtactctttccattcctcaccccaatatatgagatgctaaatatctgcatgttcccaaaggattcaatagcatttttccaaaaatttgtgcacagaataaaggaaacccgtctggattctaagcataagcaccgagtggattttctccagctgatgctgaacgctcataataattccaaagacgaagtgtctcataaagccctgtctgatgttgaaatcatagcccagtcagttatctttatttttgctggctatgaaaccaccagcagcacactctcctttgtcttgtatttcctggccactcaccctgatattcagaagaaactgcaggaggagatcgatggggccctgccgagtaaggcacctcctacctacgatattgtgatggaaatggaatacctggatatggtgttgaatgaaactctcagattgtatccaattggtaatagacttgagagagtctgtaaaaaagatatagaacttgatggtttgtttatacccaaagggtcagtagtgacgattccaacatatgctcttcatcatgacccacagcactggccaaagcctgaggaatttcatccagaaaggtttagcaaggagaacaagggaagcattgatccttatgtatatctgccctttggaaatggacccaggaactgcattggcatgaggtttgctctcatgaatatgaaactcgctctcactaaagttctgcaaaacttctccttccagccttgcaaggaaacacagatacctctgaaattgagtagacaagcaattcttgaaccagaaaaacccattgttctaaaggttctgccacgggatgcagtcataaatggagcctgactttccctcaaggaattttattgggatcttcacaaaggcagtgtctaagaacattgaaccttttaatttacttcatgaatgaattccagataaaactgggacttaattgactgctcttgatgcatggttaaagatttggtacatttatggatctttctaagtgtctatacgaagtaccacataataaaaaggagttggcaagtctgtgatggaacaggaaattcacctttgctgattctcatgggaccatctccatccacatctggtggtctctgttaatttcttttgagctcttttgatagtaaccatgtctctgtaatttgatcaataatactttgatgtaaaggtgaaaa

SEQ ID NO: 4046 - DNA, 1630 bp, Rattus norvegicus
  Genbank Accession No. NM_153313
gttaagtgttggtcatttgtctttgggagcctgggcagcagcaaggcagccatggagctgctgaatgggactggcctgtggtccatggccatattcacagtcatcttcatattactggtggacctgatgcaccggcgccatcgctggacttctcgctaccctccaggccctgtgccgtggcctgtgctgggcaacctgctgcaggtggacctcagtaacatgccatacagcctctacaagcttcaacaccgctatggtgacgtgttcagcctgcagaagggttggaagcccatggtcattgtcaacagactgaaagcggtgcaggaagtgctggtgactcatggagaggacactgctgaccgccctccagtgcccatctttaagtgcctgggtgtgaagcccagatcccaaggtgtgatccttgcatcttacgggcctgagtggcgagagcagaggcgattctctgtgtccaccctgcgcaccttcggcatgggcaagaaatccctggaggagtgggtgaccaaggaggccggccacctctgtgatgccttcactgcccaggctgggcagtccatcaatcccaaggccatgctgaacaaagccttgtgtaatgtgatcgcatccctcatttttgcccgtcgctttgaatatgaagacccttacctcatcaggatggtgaaactagtggaagagagtttgacagaagtctctggtttcattcctgaggttcttaacacgttcccagcactgctgcgcatcccagggctggctgacaaggtcttccaaggtcagaagaccttcatggccttactggataacctgctggctgagaacaggaccacctgggaccctgcccagccaccccgaaatctgactgatgccttcctggctgaggtggagaaggccaaggggaatcctgagagcagctttaatgatgagaacctacgcatggtggtagttgacctgttcactgcagggatggtgaccaccgccaccacactgacctgggccctactgctcatgattctatacccggatgtgcagcgcagagtccaacaagagattgatgaggtcatagggcaggtgcggtgtccagagatgacagaccaggcccacatgccctacaccaatgctgtcatccatgaggtacagcgctttggggacattgctccattgaatttgccacgcatcacgagttgtgacattgaagtgcaggacttcgtcatccccaaggggacgaccctcatcatcaacctgtcgtccgtgctgaaggatgagaccgtctgggagaagccccaccgcttccatccagaacacttcctggatgcccagggcaactttgtgaagcatgaggccttcatgccattctcagcaggccgcagagcatgccttggggagcccctggcccgcatggagctcttcctcttcttcacctgcctcctgcagcgcttcagcttctccgtgcccgtcggacagccccggcccagcacccatggcttctttgcttttccagttgcccccttgccctaccagctctgtgctgtggtacgggagcaaggactctaattccagtccagctctacagggcaagctgagccacgtttaataaaccagtcttttggcgcgccta

SEQ ID NO: 4047 - DNA, 1716 bp, Rattus norvegicus
  Genbank Accession No. NM_153314
gaaagcttactagataaaaggtcaagcagtgacagaaaggaacacactgtgaacagaaggtttttgatttttaagatgcctgggaagtggatttctgctcttctgctgctacagataagttgctgtttccaatctgggaactgtgggaaggtgttggtgtggccgatggaattcagccactggatgaatataaaaacaatactggatgaacttgtacagaggggccatgaagtcagtgttctgaaaccttcggcttactatgttcttgatccgaaaaaatcgccagatcttaagtttgaaactttccctacatctgtcagtaaagatgaactggaaaattatttcataaagcttgtggatgtgtggacttatgagttgcaaagagatacatgtttgtcttattctcctttactacaaaatatgatagatgaattttctgattactatctaagtctttgtaaagacaccgtttcaaacaagcagctcatggcaaaactacaggaatccaagtttgatgttcttttgtcagatcctgtggctgcctgtggggagctgatagccgaagtgctccacattccttttctgtacagtcttcgcttctctccaggctacaaaattgaaaagtccagtggaagatttatattacctccatcttatgtaccagtaattttgtcaggaatgggtggcccaatgacattcatagacagggtaaaaaatatgatatgtacgctttattttgacttttggttccatatgtttaatgccaagaaatgggatccattttacagtgagatttttggaaggcccaccacattagctgagacaatgggcaaagcagaaatgtggctcattagatcctactgggatttggaatttccccacccaacattaccaaatgttgactatattggaggactccaatgcagacctcctaaacccttgcccaaggatatggaagattttgtccagagctctggagagcatggcgtggtggtgttttctctggggtcaatggtcagcagcatgacagaagaaaaggccaatgcaattgcatgggcccttgcccagattccacaaaaggttctttggaaatttgatggcaaaaccccagcaaccttaggacccaataccagagtctacaagtggcttccccagaatgacctccttggtcatccaaaaaccaaagcctttgtaactcatggtggagccaatggtgtctatgaggccatctatcatggaatccctatggttggcattcctatgtttggagaacaacatgataacattgcccacatggtggccaaaggagcagctgttacactgaatatcaggacaatgtcaaagacagatttgttcaatgcactaaaggaaataataaacaatccattctataaaaaaaatgctgtgtggttgtcaaccattcaccatgaccaacctatgaagcccctggacaaggctgtcttctggattgagtttgtcatgcgccacaaaggggccaagcacctgagaccacttggacatgaccttccctggtaccagtaccactctctggatgtgattggattcctgctctcctgttcggcagtcattgcagtccttactgtaaaatgcttcttgtttatttaccgactctttgtgaagaaggaaaagaaaatgaagaatgagtagagctcatttacaatgcactacaggaatgaaatttcagccacattctaa

SEQ ID NO: 4048 - DNA, 1782 bp, Rattus norvegicus
  Genbank Accession No. NM_153318
gcgattggctggttcagcccagctcaacttcccgcacagcttccggcaagtcggaagccagggacaaaaagttttcaaagaagataggaggttgtggaggactcgctgctcatgagagaaggatgctacaactaagcctgtcccggctgggaatggggtccctgacagcctctccatggcatctactgctgctgggaggagcctcttggatactagcccgaattctggcctggatctataccttctatgacaactgctgccgccttcgttgcttccctcagccccctaaaccaagttggttttggggtcacttgaccttgatgaagaacaacgaggaaggcatgcagttcatagcacatctgggccgcaacttccgtgatatccacctctcttgggtgggacccgtgtacccgatcctgcgactcgtccaccctaacgtcattgctcccctgctccaagcctcagctgctgttgcacccaaggaaatgaccctctatggcttcctgaagccctggctgggggatgggctcctgatgagcgctggtgagaagtggaaccaccaccgacgcctgctgacacccgccttccactttgacatcctgaagtcctacgtgaagatttttaacaagagcgtgaacaccatgcatgccaagtggcagcgtctgactgccaagggcagtgcccgtctggacatgttcgagcacatcagcctgatgaccttggacagcctgcaaaaatgcatcttcagcttcgacagcaactgtcaggagtctaacagtgaatacatagctgcgatcctggaactcagctccctcatagtgaaacggcaacgccagcccttcctgtacctggacttcctgtattacctcactgctgatgggcggcgcttccgcaaggcctgcgacgtggtgcacaacttcacagatgctgtcatcagggagagacgcagcaccctcaatacccagggcgttgatgaattcctaaaggccagggctaagactaaaactttagactttattgatgttctcttgctggccaaggatgagcatgggaaggggctgtcggatgtggacatccgagcagaggctgacaccttcatgttcggaggtcatgacaccacggccagcgcactctcctggatcctgtacaacctggcaaggcacccggaataccaggagcgctgccggcaggaggtgcgggagctgctgagggaccgagagcctgaggagattgaatgggacgacctggcccagctgcccttcctaaccatgtgcatcaaggagagtctgcggctgcaccctccagtcttattaatctcccgctgctgttcccaggacattgtgctgccagatggccgggtcatccccaaagggaacatctgtgtcatcagcatctttggggttcaccacaatccttcagtgtggccagaccctgaggtctacaaccccttccgctttgacccagaaaacccacagaagaggtcacctctggcttttattcccttctcagcgggacccaggaactgcataggacagactttcgccatgagcgagataaaggtggcgctggcgctgacgctgctgcgcttctgcgtcctgccagatgacaaggagccgcgccggaagccggagctgatcctgcgtgcggagggcggactgtggctgcgggtggaaccgctgagcacagtgacctcacagctgccttgggacctcctcgcccaccctcctacctcttgagatctctgaataaagaattaaataagaaaaaaaaaaaaaaaaaaaa

SEQ ID NO: 4049 - DNA, 2316 bp, Rattus norvegicus
  Genbank Accession No. NM_153622
cggacgcgtgggcggacgcgtgggagagaagcctgctgaggaaacactggaaagccttacctcaggcactaagttgctaattatccagaaggaaaaacgacaatggccacaatggtagaactgagccctacaagtgagcagtgtgagtttgtcctaggtctgccagtgaataagaagacccctccccggaaagtcccgagtttatgttccatgcgctattcaatagccttcatcgcacatatctgcaacttcacattgatagcacagaattccatcataagcatcaccatggtagccatggtcaacaacacggaccagccatcccacctcaatagctctactgaatggtttcctgatggtttaaacggtgatcaacatgaagcttcaaagcatctttctataaaggcccctgtgtataactggagtcctcaaacccaaggaatcatcttcagctctgtccagtatggcatgatgctgatgcagggtcctggcggatacttggcagggaaattaggaacaaagaaagtggttggaattgctctgttgggatcgtcactgctcactctctgcatcccactggctgccaatcttggactagcttttctcctggcaactcgagcagttcagggcttaacccagggcgctggatatgggggacagtttgcactctggcagaagtgggctcctccaaatgaacgcagccgactctgcagcattgccatgtcaggaatgatattgggaatctttgctgtgctccttgtgggcggcatcattagtgaagccctcgggtggccctttgtcttttatatctttggaagtattggtgtggtctgctgccttctctggctcattctggtttatgatgaccctgtctctcacccatggataagtagcccagaaaaggagtatattttatcctccctggaccaacagttcaactcagaagagcaaccacttcccatcaaagctatgctcaaatctctgcctctctggtccatgtgtctttgcagtatgacccatcagtggcttgttaacacccttataatatatactccaacctacatcagttctgtgttcaaagttaacatcagagataatgggctcctgtcttctcttcccttttttgttgcctgggtcattggtatcctgggaggcctgctggcagatttcctactaagcaagaattttaggctcataactgtgagaaaaatcatcacaatcttaggaaatactccccctgctgcccttgttgtggctctgccctatgtccaatccagctatattgcaacaactacatttctgaccctttcctgtggactaagccctctatgtcagtcaggagtctatattaatgcattagatattgctccaaggtatgccagccttctcatgggaacatcaagagggctcgcacattcatctgctgtaatggtacccattgttgctggctttttcctcaatcaggactctgaattcgggtggaggaatttcttttttgttctatttgcgattaacctatttggcttaatcatctacctcgtgtttgcgaaagcagatatccaagaatgggctagagagaggaagctcacccgtttgtgaaggtgctttaatcctggacttcagtgcaactacagaagagaatgactgtcatacagctgtgataaaacatcatggccaaagcattgtgggacaaaaagaatttatttcaccctacaactctcaggccacagttcatcaccaagagaagacagtgcaggaactccaggcagaaactgaagcagaggccatggggagtgctgcttacaggcttgttctccatgggttgctcatgctgctttcttatacaactcagcaccacctacctgcccaaggttggcaccaccccaagtgatccaggtcttccaacatccatcattaaccaagaaaatactatataagacttgtctataggcaatctgatggaagcttttctcatctggagtccttctttccagacacctctagcctgtgtcaccttgacacaataaatcaaccaggacaatgaccaaggagaaaactgattgttcctgagtaataaaaataattaacatcactaaacagtccaaaaatggcttagtagcatggcaaaggccaagctatgagcaacaagggtggggttcagtcctgagcagtctaacccaagagactgcttgaagcttctaccacacaccatccatgaaggtgtgttctacttggatcagaaacacttgccaaaagtcaacaaactgtacctgttcttttattaaatctttatgacaaccccaaaaaaaaaaaaaa

SEQ ID NO: 4050 - DNA, 679 bp, Rattus norvegicus
  Genbank Accession No. NM_153628
gagccgagtgtgacagaccgagccggccggccgcctgggcccccagagaccccgccatggttcgtgcgggcgccgtggggacgcatctccccacgtccagcctggacatctttggggacttgaggaagatgaacaaacgacagctttactaccaggtcctaaactttgccatgattgtgtcttctgcgctcatgatatggaaaggcttaattgtgctcacgggcagtgagagtcccatcgtggtggtactgagtggcagtatggagccggcctttcacaggggagatctgctgttcctcacaaatttccgggaggatcccatcagagctggtgaaatagttgtttttaaagttgaaggaagagacattccgatagttcacagagtaatcaaggttcatgaaaaagataatggagacatcaagtttctgactaaaggagataataatgaagttgatgatcgaggcttgtacaaagaaggccagaactggctggagaagaaggacgtggtaggaagagctcgagggttcttaccatatgttggcatggtcaccattataatgaacgactatcctaagttcaagtacgctcttgtggctgtgatgggcgcatacgtgttactgaaacgtgaatcctaacatgagaagcagttcctgggaccagactgaaacgaattctgtct

SEQ ID NO: 4051 - DNA, 1375 bp, Rattus norvegicus
  Genbank Accession No. NM_153821
ctttttttttttttctttctgatttaagcttagcgtgtttgtttgtttggtttggtttttaaactttttttggtgtggattatctctctggaccacgccggacttggcttcagcgaacgaaccgaagctgggagaaagttacttgagctgaaagttctgcacttcagaagggggtttctctctctctctctctctctctctctctctctctctctcctccactcccccctctttcttccccactcggctcctctcccccctcacgcccacagcgtttggtgttgattcgagcgttaagaggggggtgggtgggattggagggaagaccatgacctccagctacgggcacgttctggagcggcaaccggctctgggcggccgcttggatagccctggcaacctcgacaccctgcaggcgaaaaagaacttctccgtcagtcacctgctagacctggaggaggccggggacatggtggcggcacaggcggacgaaagcgtgggcgaggcgggccggagcctgctggagtcaccgggactgaccagtggcagcgacacccctcagcaggacaatgatcagctgaactctgaggagaagaagaagagaaagcaacggagaaacaggacaaccttcaatagcagccagctgcaggccttggagcgtgtcttcgagaggacccattacccggatgcttttgtacgggaagatcttgcacgtcgggtgaacctcacggaggccagagtgcaggtgtggtttcagaaccgaagagccaagttccgcaggaatgagcgagccatgctggccaataaaaacgcttctctcctcaagtcctactcaggagacgtgactgccgtggaacaacccattgtacctcgtcctgctcccagacccaccgattatctctcctgggggacagcctctccgtacagcgccatggctacttattctgccacatgtgccaacaatagccctgcgcagggtatcaacatggccaacagcattgccaacctgagactgaaggccaaggaatatagtttacagaggaaccaggtgccaacagtcaactgaggaaaaaaataattaaacaggcctaagaagaaatcaaaaaccataagacacctatcctgttctgtcatttcttcatccgctggaaaaaaaagataaaagcaaacaaacaaagccagaactaaaatattgggaccatggcggagaaaagcaggagaggaacaaaatgaaaattagttaacaaatgtttcttcttcctcttggataccatcaccatttgttgtgtgtgtattttttttccttctacccatgctttgctaagtatacttcaggcttcttctattaggctcaacccacccattcctataattg

SEQ ID NO: 4052 - DNA, 556 bp, Rattus norvegicus
  Genbank Accession No. R46934
  misc_feature (1)..(556): n = a or c or g or t
ggnacgaggaaccatcaagaaatggggacctggatcttgtttgcctgcctcctgggagcagcttttgntatgcccctaccacctcatcctgggagccctggttatatcaacttaagctatgaggtgcttacccccttgaagtggtaccagagcatgataaggnagccgnatcccccgagtcacacccttcagtctcatcaccacctcccagtggtgccagttcaacagcccgtggccccccagcaaccaatgatgccagttcctggccacccactccatgaactccaacccaacaccatcagccaaacatccctccatccgnccagnaggccttccaggtaggccttccagncccaggtcattccaccccagtctnaatcaggcnatgtagncccagtcanctcttgtatcccatgaaggccccttggnaaccacaggccacntcttngcttcanttgttcttccaaggaggccccttgttcccccccatttcttcccctgagntttncntttttggaaggtttgggccagggaaaagaaaaagacccaagngggc

SEQ ID NO: 4053 - DNA, 419 bp, Rattus norvegicus
  Genbank Accession No. R46985
  misc_feature (1)..(419): n = a or c or g or t
ggcacgagcagccgnagccatnagcagnaangtctcacgcgacaccctgtncgaggnggtgcggnaagtcctgcacgggaaccagcgnangcgccgnangtttctggagacggtggagctgcagatcagcctgaagaactacgaccctcaganggacaaacgtttctcgggcaccgtcaggctcaagtccaccccacggcccangttctcggtgtgcgttctgggggancagcagnactgtgatgangncaaggccgntgatatcccccacatngtcatngaggggntcaagaagcttacaattatcaagaagtngggtcaagatggttggcttaagangtncggatggcctcttggggncctcttgagttctcttgatttaagcagnatccccaccgttttccttggggcccagngct

SEQ ID NO: 4054 - DNA, 376 bp, Rattus norvegicus
  Genbank Accession No. R47028
  misc_feature (1)..(376): n = a or c or g or t
ggcacgagcgctacaattacatttattattctacttctacttacagtacttgaatttgncgtagccttaattcaagcctatgtattcacccttctagtaagcctgtacctacatgataacacataatgacccaccagacccatgcataccatatagtaaacccaagcccatgaccactaacaggagncctatcagntcttctactcacatccggcttagnaatatgattccattacaactccacaatnctcctatcattagggctcctgacaaacatcctagctatatatcaatgatgacgagatatcatccggggaaggnacataccangggcaccacacccctattgtncagaaaggnctccgggtgcggaata

SEQ ID NO: 4055 - DNA, 354 bp, Rattus norvegicus
  Genbank Accession No. R47042
  misc_feature (1)..(354): n = a or c or g or t
ggtacgaggaggttttcaacctagngacagtcacagagcagcaccaccccctcctcctttccacacctgcaaactctcttgcttgggctgcattacttagtgttaattacatcgcagctttgagggctccggtggcaaatacccggattaaaaggtggtgntttngtatgagacaaccatgaaggcaactctcgtcttattccttctggcgcaagtctcttgggctggaccatttgagcagagaggattatttgacttcatgctagaagatgaggcctctggcataatcccttacgaccctganaatcccctgatatctatgtgncccctaccgatgccaatgccatctccgag

SEQ ID NO: 4056 - DNA, 477 bp, Rattus norvegicus
  Genbank Accession No. R47122
  misc_feature (1)..(477): n = a or c or g or t
ttcnggatttgttatacgactcactatagggcgagttgggtaccgggccccccctcgagttttttttttttttttttggaatgtaaatctttttnttaaaacacttgtctttccacagtagtaaagtgttggcatgtncatntaaaaatagtcaccanccataattatactgaatnccncttatcanctgcatacaaagtgtcttcaatacaatttctcccgtntaaaaatactgggaaaaattgataaataacaggtaagagaaagatatttctaggcaattagggattgttgggacagtgantcctgtggggtgtntggacacagccacaggacagggcctcctgacagtggctggaggntcaggcgggaagggggaaagnagaactgnctggtnttaaacttcctggctcccngctctcggggtacttaccattcaatttcaanggggaatcggngggttgggggtacccccgg

SEQ ID NO: 4057 - DNA, 464 bp, Rattus norvegicus
  Genbank Accession No. R47128
  misc_feature (1)..(464): n = a or c or g or t
ggcacgagcaagtcacagcattttcccacgtaactcgactctgaggccatagcctatccacagcctcctcgtcccctgcaccgcccagtgtctcactggctgtgttggaaacgggaattgcataagcttgcctncctcaagcaagaaatatctnttttttttcatttccatttngactcttaacactcacccagnntctgnggnttattncanttggtgggggggtgtggacttcctggagtcttcccctggnggtggggagggtaggcagagggangntacagganacagaatacaaaaacttggnnangggggggngggggagggccagntcaagaaaccaagatgggaaaagtcttgggaaaganctagnctcangcgtnctgggnaggggtgggntcccgnggggggtctttatagaanaaagaaaganttccccnanggagggccnggggggggggggg

SEQ ID NO: 4058 - DNA, 2524 bp, Rattus norvegicus
  Genbank Accession No. S45392
ggcctaggcttgccgtgcgagtcggacgtggtccgggcccaccctgctctgtactactactcggctttctcgtcaagatgcctgaggaagtgcaccatggagaggaagaggtggagaccttcgcctttcaggcagaaattgcccagctgatgtccctcatcatcaacactttttactcaaacaaagagattttcctccgggagttgatctctaatgcttctgatgccctggacaagattcggtatgagagcctgactgacccttccaagttggacagcgggaaagagctgaagattgacatcatccccaaccctcaggaagccacgctgactttggtggacacaggcattggcatgaccaaggctgacctcataaataacttgggaaccattgctaagtctggtacaaaggcgttcatggaggctctccaggctggtgcagacatctccatgattgggcagtttggtgtcggcttctactctgcctacctggtggcagagaaagtggttgtgatcacgaagcacaacgatgatgagcagtatgcctgggagtcttctgctggtggatccttcactgtccgtgcagaccacggtgagcccattggccggggtaccaaagtgatccttcacctcaaagaagaccagacagagtacttagaggagaggagggtcaaggaggtggtgaagaaacactcacagttcataggctaccccatcaccctctatctggagaaggaacgcgagaaggagatcagtgatgatgaggcagaggaagagaaaggggagaaggaggaggaagataaggaggatgaggagaagcctaagattgaggatgtgggatctgatgaggaggatgacagcggcaaagataagaaaaagaaaacaaagaagatcaaggagaagtacattgaccaggaagagctgaataagacgaagcccatctggaccagaaatcctgatgacatcactcaagaggaatatggtgaattctacaagagcctcaccaatgactgggaagaccacttggcagtcaagcacttctctgtagaagggcagttggaattcagggcattgctcttcattccccggcgagctccctttgacctctttgagaacaagaagaagaagaacaacatcaaattgtatgtccgtcgtgtgttcatcatggacagctgtgatgacctgatacctgagtacctcaacttcatccgtggtgtggttgattccgaggacctgcctctgaacatctcccgagaaatgctccagcagagcaagatcctgaaagtcatccgcaaaaacattgtgaagaagtgccttgagctcttctctgagttggctgaagacaaagagaactacaagaaattttatgaggcattctctaagaatttaaagcttggaatccatgaggattccactaaccgtcgccgcctctctgagctccttcgctaccatacctctcagtctggagatgagatgacttccctgtcagagtatgtgtctcgcatgaaggagacacagaagtccatctactatatcactggtgagagcaaagagcaggtggccaactctgccttcgtggagcgtgtgcggaaacggggctttgaggtggtatacatgactgagcccattgatgagtactgcgtacagcagctcaaggagttcgatggcaagagcctggtctccgtgaccaaggagggcctggagctaccagaggatgaggaagagaagaaaaaaatggaggagagcaaggcaaggtttgagaatctctgcaagctcatgaaggagatcttggacaagaaggttgaaaaagtgactatctccaataggcttgtgtcttccccctgctgcattgtgaccagcacctacggctggacagccaacatggaacggattatgaaggcccaggcactgcgggacaactcgacaatgggctacatgatggccaagaaacacctagagatcaaccctgaccaccccattgtggagactctgcggcagaaggctgaggcagacaaaaacgacaaagctgtcaaagacctggtggtgctgctgtttgagactgctctgtcttctctcgcttctcactttaggaggcccaaaacccactccaaccgcatctaccgcatgattaaactaggcctgggcattgatgaagatgaggtcactgcagaagagcccagtgctgctgttcccgatgagatccccccactggagggtgatgaggatgcctctcgcatggaagaagtggattaaaggctcctgggaagcccccgccctctgtatagtatccctgtggctcccccaacagccttgactggccctgacccacctgggctctctctgctcatgtctacaagaatctcttctatcctgtccttgtgccttaaggcaggaagatcccctcccacagatagcagggttgggtgttgtgtattgtgtttttttgtttgttttattttgttctgaaattaaaagtatgcaaaataaagatgatgcagttttaaaaaaaaaaaaaaaaaaaaagg

SEQ ID NO: 4059 - DNA, 2104 bp, Rattus norvegicus
  Genbank Accession No. S45812
gcccaatctcgcaggccacatgttcgacgtagtcgtgattggaggcggcatctcaggattggctgctgccaaactgttgtctgaatacaaaattaatgtcttggttttggaagcccgggatagagttggaggaagaacatatactgtgaggaatgagcatgtcaaatgggtagatgttggtggagcctatgtgggaccaacccagaacagaatcttacgcttgtctaaggagctaggcatagagacctataaagtgaatgtcaatgagcgtctagttcaatatgtcaaggggaaaacttacccattccgtggtgcattcccacctgtgtggaaccccttggcatatttggattacaacaacctatggagaacaatggatgaaatgggaaaagagatccccgttgatgcaccgtggcaagcaagacacgctcaggaatgggacaagatgaccatgaaagatctcattgataaaatctgttggacaaaaactgctcgggaatttgcgtatctttttgtgaacattaatgtgacttctgagcctcatgaggtatctgccctgtggttcctgtggtatgtgaggcagtgtgggggcactgctcggatattctcagtcaccaatggcggccaggaacggaaatttgtaggtggatctggccaagtaagtgaacagataatgggtctccttggagataaagtgaagctgagctctcctgttacttatattgaccaaacagatgacaacatcattgtagaaacactgaatcatgaacactatgagtgcaaatacgtaattagtgccatcccaccgattttgactgccaagatccactttaaaccagagcttccacctgagagaaaccaattaattcagcgtcttccaatgggggctgttatcaagtgcatggtgtattacaaggaagccttctggaagaaaaaggactattgtggctgcatgatcattgaagatgaggaggctccaatcgccatcactctggatgacactaaaccagatgggtcactgcctgccatcatgggcttcatacttgcccggaaagctgatcgacttgctaaactacataaagacataaggaagaggaaaatctgtgagctgtatgccaaagttctgggatctcaagaagcattatatccagtccattatgaagagaagaactggtgtgaggagcagtactccgggggctcgtacacagcctacttccctcctggtatcatgacccagtatggaagggtgattcgccagccagtaggtaggatttactttgcaggcacagagacagcaacacagtggagtggctacatggaaggagcagttgaacgtggagaacgagcagctagagaggtgttgaatgctctaggaaaagtcgcgaagaaggatatatgggttgaagaacccgagtccaaggatgttccagccattgaaattacccacaccttcttagagaggaacctgccttccgtgcctggtctgctcaagatcactggtgtttccacttctgtggctcttctctgctttgtattgtacaagattaagaagctcccatgctgaagtttcaccctcaggcctcctgcacgatcatcgcatgtgaaagaaagtgtggataaattacagcctatggtttgggccatttaagtgcacttgatttaaccctcatcagtttaatttcagtctttgtaaagtgataacaatccaaagaatcacctagctaatttccataagaacaagtttcatcctgtttgttagactaatttgtgtgggttgagagaataaaatgttgagtgcttaatttcaaaaagtgaagtgcttctgaggaataatttctgggttcttttgttttctttttgcctttaatgcaaaatagctaattcagaaataaaacacttgacttactgtgacttttgtgtagcgtccaaggtgtacagaggaaaatagtggctgaagtgttccctaggtatcctcactgactagctccatgtgatacacactacccttggcactttcttttctggactgtatctagacatgcattgacccttgtcagtaacattctgtgctcatttaaggaaattagcattattttaatatagt

SEQ ID NO: 4060 - DNA, 954 bp, Rattus norvegicus
  Genbank Accession No. S46798
ccggaatacctttcctcacaggattctattcaaaagatctcatcatcgaagccatcaacacgtgtaacaccaacgcctgagccctaataatcactttaatcgccacatccataactgctgtgtacagcatacgcatcatctacttcgtcaccatgacaaaaccacgatactccccactaattactattaatgaaaacaacccaaacctcattaatccaatcaaacgcctagcattaggaagcatcctagcaggcttccttatctcactaaatattcctccaactaacattcaaattctcacaataccctgacatttaaaaataacagccctacttattacaatcctaggatttgccattgccctagaacttaacaatttaacactaaatctatcaataagcaaacccaccaaactatcatcattctcaacctccctaggctactacccaccaattataccccgaattattcctcaaaaaactctaaattctagctacaaattatccttaaacctactagacctaatctgactagaaaagacaatcccaaaatcaacctcaatcacccaaacccaactatctaaaataatatccaaccaaaaaggactaatcaaactatatttcctatcatttctcatcactatttcactaatttttatcttacacacacttaatcccgagtgatttcaataataataaaaatccccgcaaacatagaccacccagccaccactatcattcaagtagcacaactataaatagccgcaaccccaatccccccctccaacataaccccaacatcatcaatctcatacattaatcaatcgcctagactatcaaaatcaactaactccaccttattattcaaactaaacaagtagaacactaccaactccataaaaagccctaaaacaaaaaaactaaaaataaaccaattagaccctcaagtttccgg

SEQ ID NO: 4061 - DNA, 126 bp, Rattus norvegicus
  Genbank Accession No. S59892
gtgtttggatgattaaaatatgaaaaggaagattcttcctcttaattgcctttgtaatatgagaatgtattagtacagacttgtaaaatatatactgtataaaaattagccaatagttctttcttc

SEQ ID NO: 4062 - DNA, 106 bp, Rattus norvegicus
  Genbank Accession No. S59893
gtgtttggatgattaaaatatgaaaaggaagattcttcctcttaattgcctttgtaatatgagaatgtattagtacagacttgtaaaatatatactgtataaaaat

SEQ ID NO: 4063 - DNA, 1892 bp, Rattus norvegicus
  Genbank Accession No. S61960
aaactgaccaaggagtatgatcaatcccgtccagcctccgagcctgcagccgtttggtcatggtgagctgcttcagctaacaattgcactgacagtgctcttgagccaagttgcttctgggcggaagtagtccatctagggctcggcctctttaaagaaacagacttctgcaaccttgggactacgtttggggtcgccggctattggacggagcagcgcaattgttagctgaagcagctcaccatgaccaaacggctgcaggctcggaggctggacgggattgatcaaaacctctgggtggagtttggcaaactgaccaaggagtatgacgtcgtgaacttgggtcagggcttccctgacttctcgcctccggactttgcaacgcaagcttttcagcaggctaccagtgggaacttcatgctcaaccagtacaccagggcatttggttacccaccactgacaaacgtcctggcaagtttctttggcaagctgctgggacaggagatggacccactcacgaatgtgctggtgacagtgggtgcctatggggccttgttcacacgctttcaggccctggtggatgaaggagatgaggtcatcatcatggaacctgcttttgactgttatgaacccatgacaatgatggctggaggttgccctgtgttcgtgactctgaagccgagccctgctcctaaggggaaactgggagccagcaatgattggcaactggatcctgcagaactggccagcaagttcacacctcgcaccaagatcctggtcctcaacacacccaacaaccctttaggaaaggtattctctaggatggagctggagctggtggctaatctgtgccagcagcacgatgtcgtgtgcatctctgatgaggtctaccagtggctggtctatgacgggcaccagcacgtcagcatcgccagcctccctggcatgtgggatcggaccctgaccatcggcagtgcaggcaaaagcttcagtgccactggctggaaggtgggctgggtcatgggtccagataacatcatgaagcacctgaggacagtgcaccagaattctatcttccactgccccacccaggcccaggctgcagtagcccagtgctttgagcgggagcagcaacactttggacaacccagcagctactttttgcagctgccacaggccatggagctgaaccgagaccacatgatccgtagcctgcagtcagtgggcctcaagctctggatctcccaggggagctacttcctcattgcagacatctcagacttcaagagcaagatgcctgacctgcccggagctgaggatgagccttatgacagacgctttgccaagtggatgatcaaaaacatgggcttggtgggcatccctgtctccacattcttcagtcggccccatcagaaggactttgaccactacatccgattctgttttgtcaaggacaaggccacactccaggccatggatgagagactgcgcaagtggaaagagctccaaccctgaggaggctgccctcagccccacctcgaacacaggcctcagctatgccttagcacagggatggcactggagggcccagctgtgtgactgcgcatgtttccagaaaagaggccatgtcttgggggttgaagccatcctttcccagtgtccatctggactattgggttgggggccagttctgggtctcagcctactcctctgtaggttgcctgtagggttttgattgtttctggcctctctgcctggggcaggaaagggtggaatatcaggcccggtaccaccttagccctgccgaggctctgtggcttctctacatcttctcctgtgacctcaggatgttgctactgttcctaataaagttttaagttattaggaccctc

SEQ ID NO: 4064 - DNA, 517 bp, Rattus norvegicus
  Genbank Accession No. S63458
aggtcccatgggccctccaggagctattggtttccctggacccaaaggagaaggtggagttgtaggaccacagggtccaccaggtcccaagggagagccaggcctccagggcttccctggaaagccaggttttcttggtgaagtaggtccccctggcatgaggggtttccccggtcctataggacccaagggagaaggtggtcacaaaggattgcctggacttcctggtgttccaggcttgcttggacccaaaggagaacctggcataccaggggatcaaggtctacagggccccccaggtatcccaggaattgtaggacccagtggccccattggaccccctgggattccaggccccaaaggggaacctggcctcccagggccccctgggttccctggtgtagggaaacccggagtagcaggacttcatggccccccagggaagcctggtgcccttggtccccaaggccaacctggcctccctgggccccccgggccccccgggccaccaggtccc

SEQ ID NO: 4065 - DNA, 2012 bp, Rattus norvegicus
  Genbank Accession No. S63519
cggtcccacttgcctctaaatgcagacagtgagtacgtcacattaagtgaccaccacttcttagggactgccagtagcagggggaatgatacggccagttgaggcatttagcagtggaactgttctataagtgggtatttattttcgacaaggtaggccacactggcctcatctgctctgagtcttcctaatatagaaagtcatggaagttgtatgtagatgcctttgtgttaaatcttgcttcagaatcagagtgggatctctgggacacataccaagctcgtttgccttcattctgtattttgtttctttgataaaataatgattttcattttttgcttaatactacattcttaagctacatagactctctccgtgatacaacaggcagtgcatgctgttactagttcttttctcctagtaaggcctacacagttatttcttgttaagaagctgtgagatgtgacctccttcctgcttagcatcacacagaaaatctgatttcaagtatctcacttattcccaccgcatcactgtcagaacagcctctcagattcacccaaagaaatacaatcatgatgactcaaatggtgtataactcaggtccagtaattctgcataggtaatcagttaaaacagtttaaacatgaaattgattcaaatattgataatgttttactaatgtgagcaacagtgttatggaaaggattcatttgactcttgtggaatgggcctgtctaatttttcttaacataatcggtaaagtattactaagaaatgctccatcctgtttctgtccaagaaaggaaagcgatacctcctgctccctgaggtggcactagggatttaaccgggaccaggaccgcctgcacgctaggcaagcactctacaaatgagatatattcctagaccaacaaatccttttgttcttctaataatttgtttaaggagtttaatcttgaactccagatgcccgcatagtcttatctgggaagatattcgtttatttctcattttgtcacccatatctacttttttcttagaggttgatgtacagatatctaaaaatatgtattcctcaatgatcttatttaggagagtgtttttactgtcatatttaaaaatagattattttcatgctgccttctgttgattttggcaaattgtataatagatcgtcttgatcattgcattttttgtcttgtaaatgtatattttgtctttgtaaattcatttacttctcaggtgtgactttatggttgactttaaacgtatgaatgaatgaggatgtaaggaaagctgtcttatttattaacgtagatgcggtaaaagaagggtatttgggtttgagcttctttttatttgagtatagaaagttatgcttttaagtaaagaaatagcaagtacagaggaaataaaaataaatagaagaaagtaaaaaggaaaaaaaccctaagaaaatgaaacaaaaaaaaagatgtaagcgaaagcaagccacatgtgatggccaatgcctgtgaccagcacttgagagactaaggcaggaagaatactacaagcttgaggcatgtgtggtttcagagtgactttgaagcccgtctgggccatagagtaagaccaggttttgttctggagaacataaacaagagtatatgataattacagggaatagtctcatggatttacataaagacaacaagagggcttaagtggagatgtgtggtgctgaagtcttgcagattggaggcagggcctgacagagcatccaccattaccaaaatccttaggatctgggagcaacaccatagctgccaagggtctgatttaaatctgttctactcactggtcagcatattggactctgctactaatataatgttaaaatagcatacctggtaaaaataaaatacacgaagtgtgttgagtgtttgagatgaaagtaaaagaaaacctaaatcattgggcaacttgggaggaaaatcattttaaataaacaaatcacatcattaccg

SEQ ID NO: 4066 - DNA, 1343 bp, Rattus norvegicus
  Genbank Accession No. S63521
gaattccaaagattcagcagttggtgaaagagttcttcaatggcaaggagccgtcccgtggcatcaacccagatgaggctgtagcatatggtgccgctgtccaggctggtgtcctctctggtgatcaagatacaggtgacctggttctgcttgatgtgtgtcctcttacacttggtattgaaactgtgggaggtgtcatgacaaaactgattccgaggaacactgtggtgcccaccaagaagtctcagatcttctccacagcttctgataatcagcccaccgtaacaatcaaggtctacgaaggtgaacgacccctgacaaaagacaatcaccttctgggtacatttgatctgactggaatccctcctgctccccgtggggtaccccagattgaagtcacctttgagatagatgtgaatggtattcttcgagtgacagctgaagacaaagggacaggaaacaaaaacaaaatcaccatcaccaatgaccaaaaccgcctgacccctgaagaaattgaaaggatggtcaatgacgccgagaagtttgctgaggaagacaaaaagctcaaagagcgcattgacacgaggaatgaattggaaagctatgcttactctcttaagaaccagatcggagataaagagaagctgggaggtaagctgtctcctgaagataaagagaccatggagaaagctgtagaggaaaagatcgaatggctggaaagccaccaggatgcagacattgaagactttaaagctaaaaagaaggaactagaagaaattgttcagccaattatcagcaaactctatggaagtggaggccctcccccaactggtgaagaggatacatcagaaaaagatgagttgtaggtgcactgatctgctagagctgtaatattgtaaatactggactcaggaactttcgttgggagaaaattgagagaacttaagtctcgaatgtaattggaatcttcacctcagagtggagttgaaaatgctatagcccaagtggctgtttactgcttttcattagcagttgctcacgtgtcttggggtcagggagaggaggaattggctattttaaaattggggaaaagctgggtcagggtgtgtgttcaccttggatatgttctatttaacggttgggtcatgcacatctggtgtaggaacttttttctaccataagtgacaccaataaatgtttgttatttacactggtctagtttttgtgaaaagcttgtaattatatccatcttttattttagataactaaaatttaagactggaaaaaaaaaaaaaaaaaaaaaaaaaaaaaaaaaaaaaaaaaaaaaaaaaaaaaaaaaaaaa

SEQ ID NO: 4067 - DNA, 828 bp, Rattus norvegicus
  Genbank Accession No. S67316
tgcacctcgtcgatcgtgcatctgtgcgccatcagcctggaccgctactgggccgtgagccgcgcgctggagtacaactccaagcgcaccccgcgccgcatcaagtgcatcatcctcactgtgtggctcatcgccgccgtcatctcgctgccgcccctcatctacaagggcgaccagggcccccagccgcgcgggcgcccccagtgcaagctcaaccaggaggcctggtacatcctggcctccagcatcggatctttcttcgctccttgcctcatcatgatccttgtctacctgcgcatctacctgatcgccaaacgcagcaaccgcagaggtcccagggccaagggggggcctgggcagggtgagtccaagcagccccgacccgaccatggtggggctttggcctcagccaaactgccagccctggcctctgtggcttctgccagagaggtcaacggacactcgaagtccactggggagaaggaggagggggagacccctgaagatactgggacccgggccttgccagccagttgggctgcccttcccaactcaggccagggccagaaggagggtgtttgtgggggatctccagaggatgaagctgaagaggaggaggaggaggaggaagagtgtgaaccccaggcagtaccagtgtctccggcctcagcttgcagccccccgctgcagcagccacagggctcccgggtgctggccaccctacgtggccaggtgctcctgggcaggggcgtgggtgctataggtgggcagtggtggcgtcgacgggcgcagctgacccgcgagaagcgcttcacctttgtgctggct

SEQ ID NO: 4068 - DNA, 2010 bp, Rattus norvegicus
  Genbank Accession No. S68589
tcctcctactgtgaacatcagtgctctggcctccgtctcctggcctccctcgcgccatggccccgaagcggcaatctgcgatcctgcctcagcccaagaaacccagacccgttgctgccccgaagctggaggacaagtcggcctctcccggcctgccgaagggagaaaaagaacagcaagaagcaattgaacatattgatgaagtacaaaatgaaatagacaggcttaatgaacaagccagtgaggaaattttgaaagtagaacaaaaatataacaaactccgccaaccattttttcagaagaggtcagaattgatcgccaaaatcccaaatttttgggtaacaacatttgtcaaccatccacaagtgtctgcactgcttggggaggaagacgaggaggccctgcactatttgaccagagttgaagtgacagaatttgaagacattaaatcaggttacagaatagatttttattttgatgaaaatccttactttgaaaataaagttctctccaaagaatttcatctgaatgagagcggtgacccatcttcaaagtccaccgaaatcaaatggaaatctggaaaggatttgacaaaacgctcaagtcaaacgcagaataaggccagcaggaagaggcagcacgaagagccagagagcttctttacctggtttactgaccattcagacgcaggtgctgacgagttaggagaggtcatcaaagatgatatttggccaaatcctttgcagtactatttggttcccgatatggatgatgaagaaggagaggcagaggatgacgatgacgacgatgaagaggaggaagggttggaagacattgatgaagaaggagacgaggacgaaggtgaagaagacgatgatgaggatgaaggggaggaaggagaggaggatgaaggcgaggatgactagcacagaagaccgatggatccaaccttctttttcattttctttttattttttaaatttccccagtccctgggagcgagttgcagtcctttcctccctgtccctctgtgctcagccgccctgtttttgaggtctcaacatcatggttctcaactaatttggggggaaaatatcttgagcaaaatacaacaggaaaagaatcttcacgtttctgttctaaattcatttttatccttgtctcaaactgtggattcaacaccaccaccatgctctgtgggaagaaagaaaagccctccagttcccttggctctgctggaggctggagggtgctaggccctgtgtagtagtgcatagaattctagctttttcttttctctgtatattgggctcagagattacactgtgtctctatgtgaatacagacagttagcatttaccaacatggatctgtctactttctcttgtttaataaaaaggaaaaaaaaagaaaaaggggggggatagacagtgagcaagggtgggatcgaggtgtcgggggggtatgtgggcatctgacaacatggcttctcctttggcatgtttcattgtgacgtttaacagacatccttgccgtttaaggtgacacttaaataaaataaaactctcctgatgaagacttgagcccgcctctcacgggagaaccagcagacgctgtaggggtttatttggagttggcattctctgttgtaactttgatctttagtttttttctttccttttttttctcttttttttttttctctttttttactctttttcttttcactggaaggaaaaagagtctcattttaaatgttgccgtgtaccaagttgctttgttacaataaaatcaatgtgtacacaagtttgacctgcataatgacaccatgtcaaactttgtctccctaacttcgtattttttatacgcactttgcaggatgacctcagggctgtgcagattgagttaaagggatttgaatcatgtcttaacgtctccgtaactgagtgggcacagcttgctgctgtggactcgtacctttggtttttatctcacatttggcattttttt

SEQ ID NO: 4069 - DNA, 433 bp, Rattus norvegicus
  Genbank Accession No. S68809
accctcatccatgtgttccatgcccactcgggcaaggaaggggacaaatataagctgagcaagaaggagctgaaagacctgctacaaactgaactctccagcttcctggatgtccagaaggatgcagatgctgtggacaggatcatgaaggaactggatgagaatggagatggggaagtggacttccaggagtttgttgtgctggtggctgctctcacggtggcttgtaacaacttcttctgggagaacagttgagcacagtctcagtaggcagcgccctccctcttttgctcctcatcccacctgtatctccctatgtacccatccttgcccaggctcaacatgcaccaaaggcgcaacagtagcagtcctgccactagttttaataaagcttctctctcccgaaaaaaaaaaaaaaaaaaaaaaaaaaaaa

SEQ ID NO: 4070 - DNA, 206 bp, Rattus norvegicus
  Genbank Accession No. S69315
gggggtggaggcggctcctgcgaccgaaaaggacttgcgactctccggccacgcaccatgagggtcctgtgggtgctgggcctctgctgcgtcctgctgaccttcgggtttgtgagagctgacgatgaagtcgatgtggatggcacggtagaagaggacctgggtaaaagtagagaaggctcacggacagacgatgaaggttgtgc

SEQ ID NO: 4071 - DNA, 195 bp, Rattus norvegicus
  Genbank Accession No. S69316
actctcactatgaatcctgtgtggagagggaatgtgacattttaaagttatttcttttgagagacttgttttggatgctcccccaagcctccctctcccctgcactgtaaaatgttgggattatgggtcacaggaagaagtggtttttttagttgaatttttttttttaacattcctcctgaatgtaaatttgta

SEQ ID NO: 4072 - DNA, 2986 bp, Rattus norvegicus
  Genbank Accession No. S70011
gtgctcctgggggcggcgcgcgggaccgtggcgcttccggcagcgggaggcggcacggagcgggaccgagaggcgcgggtggcggccggggaggcggatctgggacaatgtctggggaagtgccacccaacattaacatcaaggagcctcgatgggaccagagcacgttcattggccgagccagtcacttcttcacggttactgatcccaaaaacatccttttaacgaacgaacagctagagaatgcgaggaaagtggtacacgattacaggcaaggaatcgttcctgccggcctcacggaaaatgagttatggagagcgaagtacgcgtatgactcggccttccatcccgacacgggtgaaaagatgactctgataggaagaatgtcggctcaggtcccgatgaacatgaccatcacgggctgcatgatgaccttctaccggaccacaccggctgtgcttttctggcagtggataaaccagtccttcaatgccgtggtcaactacaccaatagaagtggtgacgctccccttactgtaaatgagctgggaacggcttatgtttctgcaacaaccggcgccgtggcgacagcccttggactcaatgccctaaccaagcatgtgtcgccgctgataggacgttttgttcccttcgctgctgtagctgctgctaactgcattaacatcccgctgatgagacaaagggaactcaaggttggtattcctgtcactgatgagaatggcacacgcttgggagaatcgaccaacgcagcaaagcaagccatcacgcaggtggtcatctccaggatcctcatggcggcccctggcatggccatccctccgtttatcatgaacaccttggagaagaaagcctttttgaagaggttcccgtggatgagcgcaccaattcaagtcacgctggttggcttttgtttggtgttcgccacccccctgtgctgtgctctgtttcctcagaagagttccatgtctgtgacaagcttggaggatgatttgcaagccagcatccaaaagagtcatcctgaattacggcgtgtgtactttaacaagggcctgtgaagccaagatcaagtgctggaggcacctcctgccatctgtgaacctcctgaagccaagcagtgaggaaatacgtgtgctgggcactccccgctacaaaagcctctgcaaaatctgtgttagagtcaagctgcctgtcaggagcctgacatttgaatcatgttgtaatttacaaaaaatacccttctggtagattttaatgatgccgttttttccaaagcccccaccttgagctttcaaaagctctggtgggcatagcatatatgctccagttacacactcagcaaacactggttatcaatcattggaaaggttaccagctcaactatcacattctgtttctacttctctccactgggtctcagcaatgaattggaaacacaaaggtctaagacaaatatccaaatttaaatactaaggaaactatatctccagtttggcaatggaccagtccaaagtagaacctcaattaaaaaaattgaggttcagagcataaacactccatacaccttcctgaagtcagccatagaccagggtaggatgccttccctgccatcctggattcttcaactcttcaatgtgtttagtgttcttaaaatattaattgtacctcacaggtactttatatcatgaatttccatcaaatacttaactgaaatggtctattcagtaccagtacaatgtgacattgactgggtgaccggtttttcagaagtgaaaccatagtccctatatgcctttttccccccatccttgtagaatttctttggctttcaggaagatatacagaaaccacacaaactagtccagcaactgtgcacattgtgctgcgttccaccctgtttgaagaccatgaagtcttgtggcatgtcaacatttctatggtgattttacatgtgacatattgggtgtagctgaggttgctttggaagtctgtggctattccacgtcatagacaagccacttgttacgctgagtgaaaaatcattgttaattcagatatttgtacgtggaaaaaaaccccacaaaaatagagactatctagtttctgtagattctttttcccaatgtttccagattgaatttcctcataaagaaaatatggtgtgccttgtgtctgtgcttctccttcctctgaaaggatggatggatctgaagcccccagccctcccccatgctgctagaatcttctgtggcgatgaccgccaaaccacctgaaatgcagtggctccctgtggcactctggcctcggacgagcctcactgccttcagtgcttctgttttaaacggtggtgagagcctggagctcaaggcagagtccacaggtgcttaaagaacactttcagaagaagctgaaggcctcgaggtctgttcatcaagccaatctcagagtccttgccccagtgcgtgtgtagctctgagaatgtgaagactcagttggaagatggtccaactcaccaagtgtcggcccagttagtgagaaacgcgcagtagacatggagctgggctcttttgaatttgttttgtgaagtgtcggcctcttactgcttttgtatagtgatactcactgtgtggtttaatcatgatttataaaaaaaaaagaagcaaatgaatgaaaattggcaatctttgctgatcttctaaaaatacttttttttcctgaagaaaaaagccacatgaagtgcaataatgttgtgcggtgacttgctgatagttctctgacgagagatagttatgtgtgtgtgactggctggcagatatcagtattagcgaggtctcttgccaatatcagagtcagtgtgtcatttcagtttaactggatgaactgtcaaataaatgcagaatgaaaataaacgactcttatttgtccgtgaaaaaaaaaaaaaaaaaaaaaaaaaaaaaaaaaaaaaaaa

SEQ ID NO: 4073 - DNA, 737 bp, Rattus norvegicus
  Genbank Accession No. S70803
cgtcagccagcaacccccgggtctgcaccttcgtctggattcttaacacagacctcaagggccgcctgcctcggtaccccatccaccagagccttgggccaccatgtttgaatttgccttttacctgcggcacgtgttggagagcctgggcgcccgagctgaccatgttccctcgccaccctgcggccagggtcctgtccacagcctctggagccagaaagtggaaatgtttgggtttctgctgcccatgaaggactttgtgctaagcaggcccgtgcgacctccttccatggctgtagcttccactaagccacactgctcggaacagggccctgagcggttgtggggttgagtacctggactcggggttccatactggaggagccgggactgtcttgcctatgctgacctacagctcctgccttctggagaggagacccccgccatgcctcactgggcaccttagacttggtcacagaggactgggcctgggtagggcaggagaccatcccgttgcaacgtgaaggtgaggaagccctctagtccaggttttgtaccattagggaaggggtctgggactgttccatacacactgtggggatgtaaggcagggggacagcattgccttcctgcctctcctcgccttctcgggaacctttgtaataaattgagccaattaaaaacacaaaataaagaatcaaaatgcaaaaaaaaaaacaaaaaaaaaaaaaaaaaaa

SEQ ID NO: 4074 - DNA, 879 bp, Rattus norvegicus
  Genbank Accession No. S75019
agcttggttcttccctccgctctgtttgccgccgtgggaacagccggccagaggtgtaccactgtgaggcgactgtttttgcacgaaagcatccatgatgaagttgtagacagactgaaaaatgactactcacagatccgtgtcgggaacccctgggaccccaatatcctctatggaccgctccacaccaaacaggcggtgagcatgtttgtgcaagccgtggaagaagcaaagaaagaaggaggcacggtggtctatgggggcaaggtcatggaccaccctggcaattatgtggaacccaccattgtgactggtcttgtccatgatgcgcccattgttcacaaggagacttttgccccaattctctatgtcttcaaattcaagaatgaagaagaggtctttgaatggaacaataaagtaaaacaggaactttcgagtagtatctttaccaaggatctgggcagaatcttccgctggcttggacctaagggttcagactgtggcattgtgaacgtcaatattcctaccagtggggctgagatcggcggtgcgtttggaggcgagaagcacacgggcagtggcagggaatctggcagcgatgcctggaagcagtacatgcggagatctacgtgtaccatcaactacagcacggccctccctctggctcaaggtatcaagtttcagtgatactggttggtcacttagccattcctgtgactgctctgaagacgcccaagaggactctgactttcccggaataaatgatcgatttgagtacagcagtgcctactctccagtgatcaaacccctgactaaatcaagatatatccatttatcaagaattgaaaattaaatatttacaacctagctacatttagc

SEQ ID NO: 4075 - DNA, 2090 bp, Rattus norvegicus
  Genbank Accession No. S75280
ccgtctgtggggtgtttgttcttgccctcgtagccctctgtccagccgccatgataagcgccagcagagccgcggccgcgcgtctcgtgggcaccacagcgtcccggagtcccgccgccgcccgtcaccaggatggctggaatggccttagtcatgaggtttttagatttgtttcaagaagggattatgcgtcagaagcaatcaagggtgcagttgttggaattgatttgggtactactaactcctgtgtggctgttatggagggcaaacaagccaaggtcctggagaactccgaaggtgccagaactaccccttctgtggttgcctttacaccagatggggagcgacttgttggtatgccagcaaaacgacaagctgtcaccaacccaaacaatactttctatgctacaaagcgtcttattggacgacgatatgatgaccctgaagtacagaaagacactaagaatgttccctttaaaattgtccgtgcctccaatggtgatgcctgggtggaggctcatggaaaactctattctccgagtcagattggagcgtttgtgttgatgaagatgaaagagactgcagaaaattacttgggccatacagcaaaaaatgctgtgatcacagtccctgcttatttcaatgactcacagcgacaggccactaaggatgctggccagatatctgggctaaatgtgctccgagtgatcaacgagcctacagctgcagctctggcttacggtctggacaaatccgaagacaaagtcattgctgtatatgatttaggtggaggaacctttgacatttctatcctggaaattcagaaaggagtgtttgaggtgaaatccaccaatggggacactttcttaggaggtgaagactttgaccaagctttgttacggcacattgtcaaggagttcaagagggagacaggggttgatttgaccaaagacaacatggcacttcagagggttcgggaagctgctgagaaggctaaatgtgagctctcctcatctgtacagactgacatcaacttgccataccttacaatggatgcttctggaccaaagcatttgaatatgaagttgactcgagctcagtttgaaggcattgtcacagatctaatcaagagaactattgctccgtgtcagaaagctatgcaggatcgagaagtcagcaagagtgacataggagaagtgatcctggttggtggcatgacgaggatgcccaaggttcagcagactgtgcaagatctttttggcagagccccaagtaaagctgttaatcctgatgaggctgtagccattggagctgccattcaaggaggtgtgttggctggtgatgttacagatgtgctactcttggatgtcactcccctctctctaggtattgagacacttggaggtgtctttaccaagcttattaataggaacaccactattccaaccaaaaagagccaggtattttctactgctgctgatggacaaactcaagtagagattaaagtgtgtcagggggaaagagagatggccggagacaacaaacttctaggacagttcactttgattggaattcccccagcccctcgtggagtgcctcagattgaagttacatttgacattgatgccaatgggattgtgcacgtttctgccaaagataaagggacaggacgtgagcaacagattgtaatccagtcttctggtggattaagcaaagatgatattgaaaacatggttaaaaatgcagagaagtacgctgaagaagaccggaggaagaaggaacgtgttgaagcagttaatatggctgaaggaattgttcatgacacagaaaccaagatggaagaattcaaggaccagttgcctgctgacgagtgcaacaagctaaaggaagagatttccaaaatgagagaactccttgctcgaaaggacagtgaaacaggagaaaacattaggcaggcggcatcttcccttcagcaggcatcattgaaactctttgaaatggcatataaaaagatggcatctgaacgggaaggttctggaagttctagcactggggaacagaaggaagatcaaaaggaagagaagcagtag

SEQ ID NO: 4076 - DNA, 1747 bp, Rattus norvegicus
  Genbank Accession No. S76054
gcagctgctccgctcgctctcgaacctccgtcttcagctcactgccttcactccagacttcaccatgtccgtcagggtgactcagaaatcctacaagatgtccacctccggtccccgggccttcagcagccgctcgttcacgagtggacccggtgcccgcatcagctcttccagcttttcccgggtgggcagcagcagcagcagcttccgcggaagcctgggcggctttggcggggctggtgtcgggggcatcacggcggtcacggtgaaccagagcctgctgaaccccttgaagctggaggtggaccccaacatccaggctgtgcgcactcaggagaaagagcagatcaagaccctgaacaacaagttcgcctctttcattgacaaggtacgcttcctggagcagcagaacaagatgctggagaccaaatggagcttgctgcaacagcagaagacatccaggagcaacatggacaacatgtttgagagttacatcaacaacctccgtcggcagctggaagccctgggccaggagaagctgaagctggaggtggagcttggcaacatgcagggcctggtggaggacttcaagaataagtatgaggatgagatcaacaagcgtacagagatggagaatgagtttgtcctcatcaagaaggatgtggatgaagcctacatgaacaaggtggagcttgagtcccgcctggaaggactgaccgacgagatcaacttcctccggcagatccatgaagaggagatccgtgagctgcagtctcagatctcagacacgtctgtggtgctgtccatggacaacagccgctccctggacatggacagcatcattgctgaagttcgtgcccagtatgaggagatcgccaaccgcagccgagctgaggccgaaaccatgtaccagattaagtatgaggaattgcagaccctggctgggaagcacggggatgatctacgtcgctcgaagacggagatctctgagatgaaccgtaacatcagccgcctgcaggcggagattgacgccctcaaaggccagagggcaaccctggaggcggccattgctgatgcagagcagcgtggggaactggccgtgaaggatgccaatgccaagctggaggatctgaagaatgccctgcagaaggccaagcaggacatggcccggcagctgcgcgagtaccaggagctgatgaacgtgaagctggcgcttgacatcgagatcgccacctaccgcaagctgctggagggcgaggagagcaggctggagtctgggatgcagaacatgagcatccacacgaagaccaccagtggctacgcaggaggactgagttcatcctacgggggactcactagccccggcttcagctatggaatgagctctttccagcccggcttcggttctgttgggggatccagcacttatagccgcaccaaggctgtggtcgtgaagaagattgaaacccgagatgggaaactggtgtctgagtcttgtgacatcatgtccaagtgaatggccactgaagtcattgccagcctgaggtcctgcagctgctcaggggtcaaggggagacagctgtatggcagagtgcagggaactagggaccagccagagtaccagccctaaacctctggccaaccttgggaggaatttctatctgggatatgccaatgcccaactcaattgtattttccaaaataaagcctcagtggctgtaaaaaaaaaaaaaaaaaaaaaaaaaaa

SEQ ID NO: 4077 - DNA, 613 bp, Rattus norvegicus
  Genbank Accession No. S77858
gcagcagccaagatgtgtgacttcaccgaggaccagaccgcagaattcaaggaggctttccagctgtttgaccgaacaggcgatggcaagatcctgtacagccagtgtggggatgtgatgcgggccctgggccagaaccctaccaacgccgaggtgctcaaggtcctggggaaccccaagagcgatgagatgaatgtgaaggtgctggactttgagcacttcctgcccatgctgcagactgtggccaagaacaaggaccaaggaacctacgaggattatgttgaaggccttcgtgtgtttgacaaagaagggaatggcactgtcatgggtgctgaaatccgtcatgtcctagtcacactgggggagaagatgacagaggaagaagtcgagatgctagtggcggggcatgaggacagcaacggttgcattaactatgaagagcttctccggatggtgctgaatggctgaggacatttacgtgtctcgagcctgctccttgcccagtgtgagattcctgtgtggccccagaggctccctaatcacagcaccttgcctgtctggtttcttttggatgatgtttgccttcaccaaataaaacttgctctctgtgctc

SEQ ID NO: 4078 - DNA, 867 bp, Rattus norvegicus
  Genbank Accession No. S79213
tggtagtggtttccgcgacaggcaggtgcgactgctttagcccggcctgggctccacggctgcctggagggtctctgcagtgcccaccccttctcctccgggaccccacgccagcagcgaccctgagccagcagccggagcgaccggcaatggcggcctcgacggcctcgcaccggcccatcaagggaatcctgaagaacaagacctctacgacttcctcggtggtggcctcggccgaacagccccgccggaccgtcgaagaggagctgagtaaaaagtctcagaagtgggatgaaatgaacatcctggcaacatatcatccagctgacaaagactacggcttgatgaagatagacgagccagacactccataccacaatatgataggtgatgatgaagatgtctgtagtgattcagaaggcaatgaagtcatgactccagagatcttagcgaaaaagttagctgctgctgagggctccgagccaaagtttcggactcgggaacaagaaagcagtggagaggaagacaatgacctctcccctgaagagcgagaaaagaagcggcagtttgaaatgaaaaggaagcttcattacaacgaaggactgaatattaaattagccagacagttaatttcaaaagacctacatgatgatgacgaagatgaagaaatgtcagagactgcagatgcagacagcatgaatattgaagagtcaaatcaaggatctactgcaggcgaccatctgcagcacaaatcacaaagttcataaacgtgttcatcagtgcagtcgttgtcaaatacaaaccttgttacttataccacactgcttcttgttctctacgactcgtgactatgtaccaaaatacaca

SEQ ID NO: 4079 - DNA, 491 bp, Rattus norvegicus
  Genbank Accession No. S79214
cccggccaagcagtcatgcctgatggcttcacaaagagcggacagagacccaggctttctgggatgcctcttgtcagtgctaaccagggggtaacaggcatgccggtgtccgcttttactgtgattctttccaaagcttacccagcggtagggtgctcccatcccatttatgagatcttgtacaacaggcagcagcactatgacccaagatctggaatctttacctgtaagatcccaggcatatactatttctcctatcacatccatgtgaaagggactcacgtttgggtaggcctgtataagaacggcacgcctacaatgtacacgtatgatgagtacagcaaaggctaccttggttcagcttcagggagtgcaatcatggagctcacggaaaatgaccaggtgtggctccagttgcccaatgcggaatcgaacggcctctactcctctgagtatgtccactcgtccttctcaggattcctagtggctcc

SEQ ID NO: 4080 - DNA, 987 bp, Rattus norvegicus
  Genbank Accession No. S79304
gaattccctttcttcgaccccgctggaggtggagacccaattctttatcaacacctattctgattcttcggccacccagaagtgtacatcttaattcttccagggtttggaattatttcacatgtagttacctattactctggaaaaaaagaacccttcggatatataggtatggtatgagccataatatctattggcttcctaggatttattgtatgagcacatcacatattcacagtaggcctagatgtagacacccgagcctactttacatctgccactataattatcgcaattcctacaggcgtaaaagtattcagctgactcgctacactacatggaggaaatatcaaatgatcccccgccatattatgagccttagggtttatcttcttattcacagtagggggcctaacagggatcgtactatctaactcatcccttgacattgtacttcatgatacatactacgtagtagctcacttccactatgtcttatctataggagcagtattcgccatcatagcttgcttcgtccactgattcccactattctcaggctataccctaaatgacacatgagcaaaagcccactttgccattatatttgtaggtgtaaacataacattttttcctcaacacttcctaggattagcagggatacctcgtcgttactctgattatccagatgcttataccacatgaaatacagtctcctctataggctcattcatctcacttacggccgtccttgtaatgatcttcatgatttgagaagccttcgcatcaaaacgagaagtgctctcaatttcctactcttcaactaacctagaatgactgcatggatgccccccaccttaccacacattcgaagaaccttcctatgtaaaagttaaataagaaaggaaggattcgaaccccctacaactggtttcaagccaatttcataaccattatgtctttctcaataaaaaaaaaaaggaattc

SEQ ID NO: 4081 - DNA, 380 bp, Rattus norvegicus
  Genbank Accession No. S81025
gggacaccaagatagcattttggtacaaataagagacccgaggatggccagagacctcagatgtgtgtctctgccagtcgactgggctggtccctctcatttgttcagtctgaatgatagttctccttccttaccattcagacatctttccagatgcccagggtgaatgtcacgtttacccacaacctggctcggcactgggtgaaattctacaaggtgtttatcagtgtaaaaacggtcagcctttggagaggtttcttggacacgtcacccccaaagagtcggaactgtgcccagctccaaccttagtgactgtgggtcatagtcccagtgctgaaactgctgaagtgtgacatgggtaagagctttgctttagtcgg

SEQ ID NO: 4082 - DNA, 1742 bp, Rattus norvegicus
  Genbank Accession No. S82383
cggagacctgatttccagaagcagctgggtaggcaccatggccgggagcaccaccatcgaggcggtaaagcgcaagatccaggttctgcagcagcaggctgatgatgcggaggagagggccgagcgcctccagcgggaagtggagggagaaaggcgggcccgggagcaggctgaagctgaggtggcctccttgaaccgcaggatccagctggttgaagaggagctggaccgcgcccaggagccgcttgccactgctttgcagaagctggaggaagcggagaaggctgctgatgagagtgagagaggtatgaaggtgattgaaaaccgggctctaaaagatgaagaaaagatggagctccaggaaatccagctgaaggaagcaaagcacattgcagaagaggcagacaggaagtatgaagaggtggctcgtaagttggtgattattgaaggagacttggaacgcacggaggaacgcgccgagctggcagagtcccgttgccgagagatggatgagcagatcagactgatggaccagaacctgaagtgtctgagtgctgctgaagaaaagtactctcaaaaagaagacaagtatgaagaagaaataaagattcttactgataaactcaaggaggcggagacccgggctgagtttgctgaaagatcggtagccaaactggaaaagaccattgatgacttggaagataagctgaagtgcaccaaagaggagcatctctgtacacaaaggatgctggaccagaccctgctggacctgaacgagatgtagaccttccccatccctgccctgccctgctggccgctcctccctctgaccttgactccgcctgaggccagcctccctgaagctggcttgaaactgagggctgatctttttaactgaaggctgctttccctcctgccacccctcttacccctcttgtctttttcacaaaactgtgtcagcctcttcccagagttccagctggagggctgaacacctttgggaacaatatttaagggaatgtgagcacagcgcaaagtgtcctcaatgcagttgtgatatgcacattgtgattactttttgtcttagcaaccattttaacattccaagcacttgtcaggcttggagcagcacatcttagcctaatggataccgtctctccatggaggagaaacacaggaatgggcctgccttactgagagccagcagagcccaggcagactccactgtgggagacctcagtgctctgtaccaagtcttagccaaacaacagggattctaggaagttagccaaaaacaaaaaccattccggtctgtgaaggttttcagctttgatatctttgaacaactttacacttatttttagttttgactttttccgtccgatgtgaccaaataggagagtgagacatctgagacgcccccgcctcccagggccttgtgcatgttaggccagcgtgctaccgttcacccccagccctgagcccgaacttgtctcagctctacccctttcccaactgctcagaaatggatcatgatgccccttagtgttgtggtgacctcttagtgttcacctgcccccaagggagacggaaaaggaaattatgtttgtgcccactgatttagccacatgaaagtcatctcattgctctttcctgaagctgctgtctctaaagtgccatctctttgtgctttgtatcagtcagtgctggagaaatcttgaatagcttatgtttaaaaaaaa

SEQ ID NO: 4083 - DNA, 897 bp, Rattus norvegicus
  Genbank Accession No. S83436
gcggcttcacgttcgcttctctctccactacagtatggggccggcgccgcgcgtcctggaactgttctacgatgtgctgtccccctactcctggctgggctttgaggtcctatgcagataccaacacctctggaatatcaagctgaagttgcggcccgctttactcgctgggatcatgaaagacagtggaaaccaaccaccagctatggttccccacaaaggccagtacatactcaaagagattcctctcctgaagcagctcttccaggttcccatgagcgtccccaaggatttctttggtgaacatgttaagaaaggaactgtaaatgccatgcgcttcctcaccgcggtgagcatggagcaaccagagatgctggagaaggtgtccagagagctgtggatgcgcatttggtcccgagatgaagatatcacggagtcccagaacattttgtctgcagcagagaaggccggaatggccacagcgcaagcccaacaccttctgaataagatctccaccgaactggtgaagagcaagctcagggagaccactggggcagcctgcaaatatggggcctttgggctgcccaccactgttgcccacgtggatggtaaaacctacatgctatttgggtctgaccgcatggagttgctagcttacctgctaggagagaagtggatgggccctgtgcccccaaccctgaatgccagactttaagattgccttagaaagtaaactttgacatctccatctgatgaagctgtcttctgtggccctgggggttgaaacaagagtccacctttagctgtggctgcctttacgtctgtgcctcccaagtgcctcttgaaaaaccttaagctctgcattcccataaataaacccgatgccactagacaaca

SEQ ID NO: 4084 - DNA, 1925 bp, Rattus norvegicus
  Genbank Accession No. S87522
catgcccgaggtcgaggatacttgttccttggcttctccagcctcggtctgccgaacccagcacctccatcttcgctgcagcgtcgacttcgctcgccgggcactgaccgggaccgccgcgctcacggtccagtcacaggaggataatctgcgcacgctgactttggatacaaaagaccttacgatagaaaaagtggtgatcaacggacaagaagtcaaatacactcttggagaaagccagggttacaaaggatcgccgatggaaatctcccttcccatcgctctgagcaaaaatcaagaggtcgttatagagatttccttcgagacgtctcccaagtcctcggcccttcagtggctcactcccgagcagacttcaggaaagcagcatccatacctcttcagtcagtgggaggccatccactgcagggcaatcctcccttgccaagacacttctgtgaagttaacctacaccgcagaggtatctgtccccaaagaactggtggctctcatgagtgccatccgtgatggagaagcccctgacccagaagaccccagcaggaagatatacagatttaaccagagggttcccataccgtgctacctgattgctttagtcgttggcgctttagaaagcaggcaaattggcccaagaactctggtgtggtctgagaaagagcaggtggagaagtctgcttatgaattctctgagactgaatccatgcttaaaattgcagaagatctggggggaccctatgtttggggacagtacgacctgttggtcctgcccccatccttcccgtacggaggcatggagaatccttgtctcacattcgtaacgcctactctattggcaggtgacaagtcactctctaatgttattgcacacgaaatatcgcatagctggacagggaacctagtgactaacaagacttgggatcacttctggttaaacgaaggacataccgtctatttagagcgccacatttgtgggcggttgtttggggaaaaattcagacatttccacgctttaggaggatggggagagctacagaacacgataaagactttcggggagtcccatcccttcaccaagctcgtggtcgatctgaaggacgtagaccccgatgtggcctactcctccattccctacgagaagggcttcgccttgctcttctacctggaacaacttcttgggggaccggaggtgttcctaggattcttaaaggcttatgtggagaagttttcctaccagagcgtaaccactgatgactggaagagtttcctgtatgctcactttaaagataaggtggatcttctcaatcaagttgattggaatgcctggctctatgctcctggcctgcctcctgtcaaacccaattacgatgtgactctcacgaatgcctgcatcgccttaagtcaaagatgggtcactgccaaagaggaagatttaaattcattcagcatcgaagacctgaaggacctctcgtcccatcagctgaatgagttcctggcacaggtgcttcagagggcacctcttcccttggggcacataaagcgaatgcaagaggtgtacaacttcaatgccattaacaattctgaaatacgattcagatggttacggctctgcattcaatcgaagtgggaagaagcaattcctttggccctaaagatggcaactgaacaaggaaggatgaaatttacacgacctctattcaaggacctcgctgccttcgacaaatcccacgatcaagctgtccgcacctaccaggaacataaagcctgtatgcatcccgtgaccgccatgctggtggggaaagatctgaaagtggattaaggaactgagtgttgctgatttcagaaaattcctttttttaagaaaaaaaatcgaacctattaagaaatacaaaattttagctctcgttgta

SEQ ID NO: 4085 - DNA, 511 bp, Rattus norvegicus
  Genbank Accession No. U01145
gccagatggggcaactcctggctcttggcctgggacttgtcttcaagatctctgctcttattagagaaagaactttagcatgaggaaaagtaagagaaaacaagttacatgggcatggtggtgtgctcctgcaatcccaatattaagaggttaaaaaataggaccagaagtttaaagtaatccttggctacctagtgagtgtaaggccagcctggaatcaataagagttggtttcaaagaagcaggaggagaaggaggaacaggaacaggaggaggagcagggggaggagaaaaaggaggaggaggaggaggaggaagaggaggaggaggaggaggaggaggaggaggaggaggaggaggaggaggaggaggagaagaagaagaagaagaagaagaagaagaagaagaagaagaagaagaagaagaagaagaagaagaagaagaagaagaagaagaagaaaaaaaaaaaaaaaaaaaaaaaaaaaaaaaaaaaaaaaaaaaaaaaaaaaaa

SEQ ID NO: 4086 - DNA, 3378 bp, Rattus norvegicus
  Genbank Accession No. U01914
atggagcaaagctacggaggttatggggcatggagtgctggacctgccaacacccagggtacatatggaagtggtgtggccagctggcaaggttatgaaaactacagctactacaatgcccagaacaccagtgtccctacaggaacaccctatagttatggcccagcctcgtgggaggccaccaaggccagtgatggtggcctggcagctgggagttctgctatgcatgtggcctcttttgccccagagccatgcaccgacaactctgactcgctcattgccaagatcaatcaacgtttggacatgttgtccaaggaaggaggcaggggtgggatcagcagcggtggggagggcatgcaggaccgagacagctccttccgcttccagccatatgagtcctacgactccaggccctgtatgcctgagcatactccctaccgccccagctacagttacgattatgactttgacttgggaactgaccgcaatggtagttttggcgggacattcaacgactgtcgggacccaaccccagagcgaggcgcccttgatggtttcttaaggggccggggccagggccgcttccaggaccggagcaactcgagcaccttcatacgtagtgaccccttcatgccaccctcagcctcctcagagcccttatccaccacctggagtgagctgaactacatgggtggacgtggtctaggtgggccctccaccaacaggccgcctccttccctcttctcccagtccatggcccctgactacagcatgatgggcatgcagggggtgggcggttttggtggcaccatgccttatggatgtggccggtcccagactcggatacgggattggcccagaaggagggggtttgaacgctttggaccagacaacatgggcaggaagcggaagccgtttccattgtatgaagaacctgatgccaagctggcccgtgctgacagtgaaggagacctctctgaaaacgatgatggagctggtgacttacggtcaggagatgaagaatttaggggggaggacgacctctgtgactcccggaagcagagaggagaaaaggaggacgaggatgaggatgtgaagaagagacgggagaagcaaaggaggagagatcggatgcgggaccgagcagctgacaggattcagtttgcctgttctgtgtgcaaatttcgtagctttgaagatgaagaaatccaaaagcatctgcaaagtaaatttcataaagagaccttgcggtttataagtaccaaactacctgacaagacagtagaatttctccaggagtatatcataaacaggaataagaaaattgagaaacggcgtcaggagttgttggagaaggaaagccctaaacccaaaccagatccattcaaagggattggccaggagcatttcttcaaaaggattgaagccgcacactgcctggcctgtgacatgctgattcctgcacagcaccagctcctgcagcggcatctgcactctgtggaccataaccataatcgaaggttggctgctgaacaattcaagaaaacaagtctccatgtggctaagagtgttctgaacaacaagcatatagtgaagatgttagaaaaatacctcaagggcgaggatccttttgtcaatgaaactgctgatcttgagacagaaggagatgagaacttaggagaggagaaggagacaccagaggaggtagctgcggaagtcttagcagaggtgatcacagcagcggtgaaggctgtagagggggatggagaaccagctgcagagcatagtgacgtcctagctgaagtggaagggcctgtggacaccgccgaggctggtagtgactcccacactggaaagctgctagaagaacagacctgtgaaacagcatctgaaaccaggaacatggaagacatggccagaggtgaggctgctgaggccagaaatgaagcagctgtgccagcagcagccgccggaagcccagtacctgtcatagccatcccaggaatcctggaagatgagctggaacaaactgatgcagaggccaaagatactcccacagaataatgatcttctcttccctgtttcaagggacgtgttatatcatgtgttctttgttttataagctgtactggggtgtgtgttattcggtggaaagactgggccatttccttcccagtgtacctcaaggattgatgctatacagtagatggcttcccacctctgttagaaatacaaaaagaggtaaaccattttcccaagtggcctttgatggctatctgtgcactgcagctagaatagtaagagtagatcttcctgacacttgttgagtcctgaattggacagaatgtgaggatttttgttttgttttgtgttgtgtttttgtttggtcttcgtttcactttattttgctttttctcttgggaagcaatctgatacgaacatagcttacttgagaaaaaaattatttaggggaattcccttattcacctctgcatggttgatgtgggacatacacagttcaaccatccatgtgtgcaagagctgagattgtgccctccaccaataaacagtcttgtttcaataaacatcaggccatttcctaactgtcggcattgaaatagcatcttgcttggaccaagctagctttagaactcaatcctactgtttagcctctgcagtgctggtgccatgagtgtacggccatgctcagtggggctttggttttgcaatacactgtatcctatgttcctctccagctgtggcagcattagacagatgacatggcagtgacttggctgtgtttgagatggtccctcaggcttccactggaaggacccgcacctgagcctgtagatcgaagacactgctaaggccttggttctcactgttcagtgcttgctaatcagttggtgttcgtctcccacctctattagtggatgttttgttgtttgctctctttccttttgttatttccacctaaaggtatttagaaaaccatggaattactccattgatgaaaaacaaatgtggacttcatagttgggatctgtctgtcaaaagctcaaaccgttaagtaaaagtgtttgactaaagcaagtagtagtccgagcaaggagctagcatgtctctaaagcagcatgtgctaaggttttacaggctcagaatgatgggtctcccccgttttgaagttacaatgctgtgtccatttgtacacagctcacatcttggaaacatgagccagtgagggactacggaagagatggtagaccatcacagcaatttcatcagcacgtctgtctgttaaggagcattactggggatgtgatagggactttggaatatcattgtcaaaacaagcaataaattgatgccacggag

SEQ ID NO: 4087 - DNA, 604 bp, Rattus norvegicus
  Genbank Accession No. U02096
cggagttttgtgaattacggtagtgggtaagacctgagttcctccagctcctacctactttcagctgactagaagggcaaggatggtagatgctttctgtgccacctggaagctgacagacagccagaattttgatgagtacatgaaggctctgggcgtgggctttgccactaggcaagtgggaaatgtgaccaaaccaacggtgattatcagtcaggaaggcggcaaagtggtgatccggacacaatgcacattcaagaacacagagatcagtttccagctgggagaagagtttgaggaaacaagcatagatgacaggaactgtaagtctgtgattcggttggatggagacaagctcattcatgtgcagaagtgggatggcaaagaaacaaattgtgtcagagaaattaaggatggcaaaatggttgtgactctcacctttggggatgtcgttgctgttcgctgttatgaaaaggcatagaagaaatgccgggtcttttgaaaacttggtttcctgaagttccagagttatccagctactgaagcactggtcactaattataagtttgtctttggtgtggaggcagaaaattataatttaagg

SEQ ID NO: 4088 - DNA, 648 bp, Rattus norvegicus
  Genbank Accession No. U02506
aatcccaatattaagaggttaaaaaataggaccagaagtttaaagtaatccttggctacctagtgagtgtaaggccagcctggaatcaataagagttggtttcaaagaagcaggaggagaaggaggaacaggaacaggaggaggagcagggggaggagaaaaaggaggaggaggaggaggaggaagaggaggaggaggaggaggaggaggaggaggaggaggaggaggaggaggaggagaagaagaagaagaagaagaagaagaagaagaagaagaagaagaagaagaagaagaagaagaagaagaagaagaagaagaagaagaagaagaagaagaagaagaagaagaaattagaagaagaaaagaagaaggacaaatggctcttttctggtctcaccttttcccttcctgtcactcatgtggacctcagataagagcacagatactctcgacctcttacatttggagagttttgagcagacaggaagaagacggagcctgggagcagctgttctccaatagtcaaattaagactgttcctctctgagctctgtacttcaaccagcacctttaggcagaagccatcaaatcagaaatgtctgttaataattaaagtctatgattgccaccaaaaaaaaaaaaaaaaaa

SEQ ID NO: 4089 - DNA, 2627 bp, Rattus norvegicus
  Genbank Accession No. U03120
gcgttcctgccgcgcagcccctccgtcgcggttcccctccctcggggctgatcattaactcaaaagcagtataaggagtgagtggccccggtgagccggtgagccggagggactcgtcgccaccgccatggacagtagcaccttgagccccgctgttactgccaccgatgcacccatccagtcctatgagcgcattcgcaatgcggctgacatatcagtcatcgtcatctacttcgtggtggtgatggctgtcgggctgtgggccatgttttccactaatcgtgggactgttggaggcttcttcctggcaggccgaagtatggtgtggtggccgattggagcctctctctttgccagtaacatcggaagtggtcactttgtggggctggcgggcacaggagcagccgcaggcattgccatgggtggcttcgaatggaacgccttggtgttcgtggtcgtgctggggtggctttttgtccctatttacatcaaggctggggtggtgacgatgccggagtatctgcggaagcgatttggaggcaagcggatccagatctacctttccgttctgtccctgctcctctacatctttaccaagatctcagcagacatcttctctggggctatattcatcaatctggccttgggcctggatatatacctggccattttcatcctgctggccatcaccgccctttacaccatcacagggggactggcagcagtaatttacacagacaccttgcagactgcgatcatgctggtgggatcttttatcctgactgggtttgctttccgagaagtaggagggtatgaggccttcatggataagtacatgaaagctattccaactttggtttctgatggaaacataaccgtcaaagaagaatgttacacacccagggccgactcgttccacatattccgagaccccattacgggggacatgccatggcctgggctcatcttcggcctgtccatcctcgccctgtggtactggtgtacggatcaggtcattgtgcagcgatgcctctcggccaagaacatgtctcacgtgaaggctggctgtaccctgtgtggctatctgaagctactgcctatgttcctcatggtgatgcccggaatgatcagccggattctatacacagacaaaatcgcctgtgtcctcccctcagaatgtaagaaatactgcggcaccccagtgggctgtaccaacatcgcctacccaacactggtggtggaactcatgcctaacggacttcgaggcctgatgctgtccgtcatgatggcttccctcatgagctccttgacctccatcttcaacagcgccagtactctcttcaccatggacatctacaccaagatccggaagggtgcatcggagaaggagctcatgattgcaggaaggttgttcatcctcgtgctgattggcatcagcattgcctgggtgcccattgtgcagtctgcccaaagcgggcagctctttgactacatccagtccatcaccagttacctggggccacccattgcagccgtcttcctgctggctattttctgcaagagagtcaatgaaccgggagccttctggggactgattctcggcttcctgattggaatctcccgtatgatcactgagtttgcctacggaactggaagctgcatggagcccagcaactgccccaagatcatctgcggggtccactatctgtactttgccatcatcctcttcgctatcagcgtcgtcaccgtcttggtcatctccctcctcaccaagcccatcccagacgtacacctgtaccgtctgtgctggagtctacgtaacagcacagaagagcgcatcgacctggatgcaggagaggaggagcccgtcgaggaggaccctaaagataccattgaaatagatgcagaagccccccagaaggagaaggggtgcttcaggaaggcatatgacctgttctgtgggctggaccaggataaaggaccgaagatgactaaggaagaggaggaagctatgaagctgaagatgacggacacttccgagaagcccttgtggaggacagtggtgaacatcaacggcatcatcctcctggcagtggctgtcttctgccacgcctattttgcctgaaccccgccttctgggggtagacttggcgactctggagttgttatttcccactagaccccgccactctgtagtggtaaggggaaactggccagttgtaaattttactcattcggataaaagatgtataagtgtgattatagacttgcttgaggaaaatgattaccctgctgtgaatttatgcctgtgaaaccagtgtgccacactcatccatcacaccagagctttggagtgacgttgactcagatgtagaaaaagtcataccgagacacagaggccctgtgttgtctgtctcaggtacgtccagcgtgtaactattgtttataattcttaaatactattttttaaaattgtggtctggttcctgacatttttctacctgacccctcaccaattcctcctcctcctcctattttttttttctaaaagaaatctcccatcatcgcatccctttagagttttttggttttttgttttgttttgttttttgtttttgtttttaatt

SEQ ID NO: 4090 - DNA, 607 bp, Rattus norvegicus
  Genbank Accession No. U04835
ggatccgtatgaccatggaaacagttgaatcacagcaggatcgaagtgtaacacattctgtggcagagcatagctccttgcatatgcagactggccaaatttctgtccctactctagctcaggatgaggagactgaccttgccccaagtcacatggctgctgccacaggtgacatgccaacttaccagatccgagctcctactactgctttgccacaaggtgtggtgatggctgcctcaccagggagtctgtacagtccccagcaactagcagaagaagcaactcgaaagcgggagctgaggctgatgaaaaacagggaagctgcccgggagtgtcgcaggaagaagaaagaatatgtcaaatgtcttgaaaatcgtgtggctgtgcttgaaaatcaaaacaagaccctcattgaggaactcaaggccctcaaagacctttattgccataaagcagagtaactgtgtttgacttggacctggttgactgtgaactctaatcggggcaggcgatgcagcatcctcgtaatggccatatggacttgtagatgggtctcttaacccttgcttaagaatacagtctgctgtagagtgtgaattgggaattc

SEQ ID NO: 4091 - DNA, 1612 bp, Rattus norvegicus
  Genbank Accession No. U05675
aggcaaagggcaactgcttggaatttcagaaaatctgaaaccatgaggcatctatggctgctgctcctgtctgtttccttagttcaaactcaagctgcaactactgactccgataaagtggacctctcgattgcccgtggtcatcgacctgttgacaggagaaaggaagagcctcctagcctaagacctgcccctcctcctatcagcggaggtggctatcgagcccgtccagccaaagttgatgcaggtcagaagaaagtggaacgaaaaccccctgatgcaggaggctgtgttcacggtgacggagacatgggagtgctatgtgctacagggtgtgagttgcgtcaaactttgctaaaccacgaaaggccaatcaaaaacagtattgctgagttaaatagcaacataaactctgtttatgagacctcttcggtcacctttcagtacctgactctgctgaaagacatgtggaaaaagaagcaggcacaagttaaagataatgaaaatgtcataaatgagtattcctccattttggaagaccagaaattatatattgatgagactgtgaacgataatatcccccttaatcttcgtgtgctccgctcaatcctggaggacctgagaagcaaaatgcaaaaattggagtctgacatctcagctcagacggaatactgccacactccatgcaccgtcaactgcaacatcccggtggtgtctgggaaagagtgtgaagagatcattcggaagggaggtgagacatccgaaatgtatctcattcagcctgacacctccagcaaaccatacagagtgtactgcgacatgaagaccgaaaacggaggatggacggtcatacagaaccgtcaggatggcagcgtcgactttggcaggaaatgggacccatacaaaaaaggatttggaaatattgcaaccaacgaagatacgaagaagtactgtggcttgccaggcgaatattggcttggcaatgataagattagccagctcaccaggataggacccacagaactcctaatcgaaatggaggactggaaaggagacaaggtgaaggcacactatggaggcttcacggtgcagaccgaggccaacaagtaccaagtgtcagtgaacaagtacaaagggactgctggcaacgccctcatggaaggggcctctcagctggtgggggagaacagaaccatgaccatccacaacggcatgttcttcagcacctacgacagggacaacgatggctgggtaactacagatccaagaaagcagtgctcaaaagaagatggcggcggctggtggtataacagatgccatgcagccaatccgaatggcagatactactggggtggcctttacagctgggacatgtccaagcacggcacagatgatggtgtggtgtggatgaactggaagggatcgtggtactccatgagaaggatgtctatgaagatcaggcccgtcttcccacagcaatagtcccccaagcatagactttcagccttctatgtctgacattttttacattatgttattggaattttctttgatacattatatccactaatgctcaaaacaatggctgagtgtgtctttttttttttttttt

SEQ ID NO: 4092 - DNA, 1589 bp, Rattus norvegicus
  Genbank Accession No. U06230
aattggcttgaaaccagttgtagggggttcgaatcagaatctctcgatcactcaaattggctcctgattgcacttcgtgaagggaagattgaagttcagtttaagaatgagttttcaacccaaatcacaactggaggcaatgttattaacaatggtatatggaatatggtgtctgtggaagaattagacgacagtgttagcattaaaatagctaaggaggccgtgatgaatattaataaacttgggagtctttttaaacctaccgatggatttctggacaccaaaatatactttgcaggattacctcggaaggtggaaagtgcactcattaagccgattaatcctcgtctggatggatgtatacgaggctggaacttgatgaaacaaggagctttgggtgcaaaggaaatagttgaaggaaaacaaaataaacattgcttcctcactgtggagaagggctcctactaccctggttcaggaattgctcagttcagcatagactacaataatgtaactaatgcagaggattggcaaataaatgtgaccttgaatattcgcccgttcactggcactggggtcatgcttgctttagtttctggggacacagtgccctttgccttgtccttggtggattctggctctggaacttctcaggacattctggtatttgttgaaaattcagtagcagctcacttagaagccataactctgtgctcggaacagccatcccagctgaaatgtaacattaacagaaatggactggaactgtggaccccagttagaaaagacgtcatttactctaaagatctccaaaggcaactcgccatcttggacaaaacaatgaaaggaaccgtggccacttacctgggtggcgttccagatatttccttcagtgccacaccagtgaatgctttttacagcggctgcatggaagtgaacatcaacggggtacagttggatctggatgaagccatttccaaacataatgacattagagctcactcctgtccgtcagtgaggaaaatccagaagaacttctaaagtctgtttcctgggcttctaatctctcttttcatattgtaattatgctcttgttcatgtttccatcaccaaatggcaggattacatgtgttatatgcatgtttaaatatgatgtggtactttgtccttcagatttttgttatataagtcgcatttttgaaaagtcttgtactcactgctgtctagaaattaaataacaaaacacatgaaacatttaaatttcaatttatttcctataaatcttccagtgcgtcacaggcaacataatctgctccattgtctttggagagcgctttgactacagagaccgccagttcctgcgcttgctcgacctgttgtataggaccttttccctcataagctcattctccagccagatgtttgaggtctactctgacttcctgaagtactttcctggtgtccacagagaaatctacaaaaacctgaaggaagtcctcgactacattgatcatagtgtggagaaccacagggccactttggaccccaatgctccccgagactttatcgatactttccttctggaattc

SEQ ID NO: 4093 - DNA, 2226 bp, Rattus norvegicus
  Genbank Accession No. U07201
aagaagcttggcgactgtaaggcgagaggaagcctccagcgggtcttgtcgctgagctacctcagctccacctcctctggccctggcccctagtgcgcagactgcctgcagccctcctgtagcatgtgtggcatctgggccctcttcggcagcgatgactgcctttccgtgcagtgtctgagtgcgatgaagattgcgcacaggggcccagatgcattccgttttgagaacgtcaatggatacaccaactgctgttttggcttccaccggctggcggtggttgaccccctgtttggaatgcagccaataagagtgaggaaatatccttatctgtggctgtgttacaacggtgaaatctacaaccacaaggcgctacaacaacgtttcgaatttgagtatcagaccaatgtggacggtgagataattctccatctctatgacaaaggcggcatcgagaaaaccatctgtatgttggatggggtgtttgcatttatcttactggacactgccaataagaaagtattcctgggcagagatacctatggtgtcaggcctttgtttaaagccttgacagaagatggatttctggctgtgtgttcagaagccaaaggccttgtctccttgaaacactccaccacccccttcctaaaagtggagccctttcttcctggacactatgaagttttggatttaaaaccaaatggcaaagtcgcgtctgtggaaatggtcaaataccatcactgtacggatgaaccactgcatgccatctatgacagtgtggagaaactcttcccaggctttgagatagagaccgtgaaaaacaatctgcgtatcctttttaacaacgctatcaagaaacgcttgatgactgaccggaggattggctgccttttatcaggaggcctggactccagcttggttgctgcctccctgctgaagcaactcaaggaggcccaagtgccctatgctctccagacatttgctatcggcatggaagacagccctgatctactggctgccagaaaggtggcaaattatattggaagtgagcatcatgaagtcctttttaactctgaagaaggcattcagtccctggacgaagtcatatttcccttggaaacttatgatattacgacagttcgagcatctgtaggtatgtatttaatttccaagtatattcggaagaacacagacagcgtggtgatcttctccggagaggggtcagatgagcttacacagggctatatatatttccacaaggcgccttctcctgagaaggcggaggaggagagtgagaggctcctgaaggaactctacctgtttgatgtcctccgtgccgaccgcactactgctgctcacggtctcgaactgagagtcccgtttctggatcatcggttttcttcctattacctgtctctgccaccagaaatgagaattccaaaagatggcatagaaaaacatctcctgagagagacttttgaggactccaacctgctacccaaagagattctctggcgacccaaggaagccttcagtgatgggatcacctcagtcaagaactcctggttcaagattttacaggacttcgttgaatatcaggttgatgatgcgatgatgtctgaggcctcccagaaatttcccttcaatactccccaaactaaagaaggctattactaccgtcagatctttgaacaccattaccccggccgggctgattggctgacccattattggatgcccaagtggatcaatgccaccgacccttctgcccgcactctgacccattacaagtcaactgccaaagcttagacgctctctacactcttgtgtaaaagtcaatgtttcttcctcctgctctgaaggtagagagacattgaaacaatcagagagaatgaaagtcaaccatcagctgctcaggcttatttaggcatggaaagaaataaaagtatcacatctaaaatgcctcctggttgtaggtaccagtgcggccttgtagctagagactgagtggctcttgctgtattgccactgtcgggatgacagtgagctatgctaaggggcatcttagttctgccttcattcctaacagctggctagtcagattgctatgtgagtcctttgtgggaactggtgacaattctgctttgtaggccaaggattcagtttctttctctttctttctttctttctttctttctttctttctttctttctttcttggaattc

SEQ ID NO: 4094 - DNA, 2370 bp, Rattus norvegicus
  Genbank Accession No. U08214
gtggaattcttagagccaaatgtgaatgatagcaataatctatacattctagtagccagggaggacaagttttgccatgaaagatccaggttacaaaactctaatgcagttcaaactcagaatgatgacacattccaacattcaatcaggaagggctacaaagaccctatctaaaaaaacaagaaacaaaaaccaaatcaagtcaataaaccaaagtaccactataggaagatttgtaaatgttaaattattttaccaacgatctttatttttaaaataagcccaacttcaatcaaagtgaagtttttaatgttaattctttatacaaatcaatctttagagtgacagttctgagtttctctgtgtcaccttggctgtcctccaacagaggttgacctgcctctgcctgcccgagtgctacgattgaagaccgtgccaccaacgctcgaggccttaaagatgataacctacaaaattctgctttaaagaatattctattgtgacgtaagcctgtaaatcttaccacttgagaggtctctgatataattagatcacaagtttaaggtcagtttgtgtcacacagttcaaggctagactgaacttcttcacagcaagaccttatctcaaaaacaagcaaaaacataaacaaaaaaggaaaaaaagaaaaaagaaaaaaacccacccaactacaataagatcacaactcaagaattttaagtttaacaaacatacttaagacttctcccaaaaaaaaaaaagtatattcccagaaatatagaaactctctatttcaatgattttgtatatatccttagagaagaaacattttcttggcacagaggcagagctgaaacaatgtcttactatgtaagacattctctcgtgccgaattcggcacgagagaagaagggcaggatgctgggggtctactgcgagagtggtacatgatcatctctcgagagatgttcaaccctatgtatgccttgttccgtacctcacctggtgaccgggtcactacacgatcaatccatcttcccactgtaaccccaaccacctcagctacttcaagtttagctggacgatatgtagccaaagctgtaatgacaaccgccctcctggagtgctactttactaggtctttctacaaacacatcttgggcaaatctgtcaggtatacagatatggagagtgaggattaccacttctaccagggtctagtttatctgcttgaaaatgatgtctctacattaggttatgacctcaccttcagcactgaggttcaagaatttggagtatgtgaggttcgtgacctcaaacccaatggagccaacatcttagtaacagaggagaacaagaaggaatatgtacacctggtttgccagatgagaatgacaggagccatccgcaaacagctggcagccttcttagaaggcttctatgaaatcattccaaagcgcctcatatccatctttactgagcaggagttagagctgctctatacagggctgcctaccatcgacatagatgacctaaaatctaacactgagtaccacaagtaccagtccaactccattcagatccaatggttctggagagcattgcgttcctttgaccaagcagaccgtgccaagttcctccagtttgtcacaggtacttccaaggtgcccctgcaaggatttgctgcccttgaaggcatgaatggcattcagaagtttcagattcatcgagacgacagatccacagatcgcctgccttcagctcacacatgttttaatcaactggacctgcctgcctatgagagctttgagaagctccgccacatgctactattggccatccaggagtgctctgaaggctttgggctggctaataaataaggccctgcctacttctgtggggtttttctaccatttttggacctggggaggggggggggtttaaaagatccagaaagaaaatgtcaaaatccaataaatgaaattcaccaactcaccatgtgtgtgtccagctgcccatcttcctagtgcatacctgttcgcttctcattctctttcctctaccctttccttgcctttcccttttccatgccgtccatgatccccaccccatgtgttaagaaggcagttgctttgcagggacctgtttgtccaactgaacagtgtgctcctcagattctgtgttcagaaggatttgctgcattgagacttgaaacctttggtaaggggaaaattatatatatatatatttttttgttctgtttgcatttcttaatttgtgcttggaatgtgttgatgtgcacagctaatgattcaatgcgagacaagattggcatctgtgttgtggaggttcaaataaagagcactcttcata

SEQ ID NO: 4095 - DNA, 2756 bp, Rattus norvegicus
  Genbank Accession No. U09870
tgtggcttgcagctgccagctaccctgctaaatgtttggtgggaaaagcttgggattcaccatggcaactgaagaggccatcatccgcatccccccataccactacatccatgtgctggaccagaacagtaatgtgtcccgtgtggaggttggaccaaagacctacatccggcaggacaatgagagggtactgtttgccccagttcgcatggtgaccgtccccccacgccactactgcatagtggccaaccctgtgtcccgggacacccagagttctgtgttatttgacatcacaggacaagtccgactccggcacgctgaccaggagatccgactagcccaggaccccttccccctgtatccaggggaggtgctggaaaaggacatcaccccactgcaggtggttctgcccaacacagcactgcatcttaaggcgttgctggactttgaggataagaatggagacaaggtcatggcaggagacgagtggctatttgagggacctggcacctacatcccacagaaggaagtggaagtcgtggagatcattcaggccacagtcatcaaacagaaccaagcactgcggctaagggcccgaaaggagtgctttgaccgggagggcaaggggcgcgtgacaggtgaggagtggctggtccgatccgtgggggcttacctcccagctgtctttgaagaggtgctggatctggtggatgctgtgatccttacagaaaagactgccctgcacctccgggctctgcagaacttcagggaccttcggggagtgctccaccgcaccggggaggaatggttagtgacagtgcaggacacagaagcccatgttccagatgtctatgaggaggtgcttggggtagtacccatcaccaccctgggacctcgacactactgtgtcattcttgacccaatgggaccagacggcaagaaccagctgggacaaaagcgtgttgtcaagggagagaagtcctttttcctccagccaggagagaggctggagcgaggcatccaggatgtgtatgtgctgtcagagcagcaggggctgctactgaaggcactgcagcccctggaggagggagagagcgaggagaaggtctcccatcaggccggagactgctggctcatccgtgggcccctggagtatgtgccatctgcaaaagtggaggtggtggaggagcgtcaggctatccctctggaccaaaatgagggcatctatgtgcaggatgtcaagacggggaaggtgcgggctgtgattggaagcacctacatgctgactcaggatgaagtcctgtgggaaaaggagctgccttctggggtggaggagctgctgaacttggggcatgaccctctggcagacaggggtcagaagggcacagccaagccccttcagccctcagctccaaggaacaagacccgagtggtcagctaccgtgtcccgcacaatgcagcggtgcaggtctatgactacagagccaagagagcccgtgtggtctttgggcccgagctagtgacactggatcctgaggagcagttcacagtattgtccctttctgccgggcgacccaagcgtcctcatgcccgccgtgcactctgcctactgctgggacctgatttctttactgatgtcatcaccatcgaaactgcagatcatgccaggttgcagctgcagcttgcctacaactggcactttgaactgaagaaccggaatgaccctgcagaggcagccaagcttttctccgtgcctgacttcgtgggtgacgcctgcaaggccattgcatcccgagtccggggggctgtagcctctgtcacctttgatgacttccataaaaactcagcccggatcattcgaatggctgtttttggctttgagatgtctgaagacacaggtcctgatggcacactcctgcccaaggctcgagaccaggcagtctttccccaaaacgggctggtagtcagcagtgtggatgtgcagtcagtggagcccgtggaccagaggacccgggatgcccttcagcgcagcgttcagctggccatcgaaattaccaccaactcccaggaggcagcagccaagcacgaggctcagagactggaacaggaagcccgtggtcggcttgagaggcagaagatcttggaccagtcagaagctgaaaaagcccgcaaggaactcttggagcttgaggctatgagcatggctgtggagagcacgggtaatgccaaagcagaggctgagtcccgtgcagaggcagcgaggatcgaaggagaaggctctgtgctgcaggccaagctcaaggcacaggcgctagccattgagacggaggctgagttggagcgagtaaagaaagtacgagagatggaactgatctatgcccgggcccagttggagctggaggtgagcaaggcgcagcagcttgccaatgtggaggcaaagaagttcaaggagatgacagaggcactgggccccggcaccatcagggacctggctgtggccgggccagagatgcaggtgaaacttctccagtccctgggcctgaaatccactctcatcaccgatggctcgtctcccatgaacctcttcagcacagcttcgggttgctggggctggggtctgatggtcagccgccagcacagaagtgatccggcagcccggggaagacttgctctcccaggctctccgaagcagccatgctgtgccttaggtcaacactgactgcactgacaatggataaaataaattgacaactgta

SEQ ID NO: 4096 - DNA, 2226 bp, Rattus norvegicus
  Genbank Accession No. U10188
gccgcgtttgatttcggggaggagcggagcagagcaggacccctctgcacccactcagccgactcagccaggttcgtggagcaacttcggcatcatgaatgcagcggccaaagctggaaagctggctcgagcaccagccgacctcgggaaaggtggggttccgggagatgcagttcccggtgccccagtggccgccccgctggcgaaagaaattccggaggtcctagtggacccacgcagccggcagcagtatgtacggggccgcttcctgggtaaaggaggcttcgccaaatgcttcgaaatctcagactcagacacaaaagaggtgttcccaggcaagatcgtgcctaagtctttgctgctcaagccccatcagaaggagaaaatgtctatggagacctccattcaccgcagcctcgaacaccagcacgtcgtaggcttccatggcttttttgaggacagcgactttgtgttcgtggttttggagctctgtcgcaggaggtctctcctggagctgcacaaaaggaggaaggcgctgaccgagcccgaggcccgatactacctgcggcagatagtcctgggttgccagtacctgcaccgcaatcaagtcattcacagggacctcaaactgggcaacctctttctgaatgaggatctggaggtgaaaataggggattttggcctggcaacaaaagtggaatatgaaggggaacggaagaagaccctgtgtggcactcctaactacatagctcccgaggtgctgagcaagaagggacacagctttgaggtggacgtgtggtccattgggtgcatcatgtataccttgctggtgggcaagccaccttttgagacctcatgcctaaaagagacctacctccggatcaagaaaaatgaatacagtattcccaagcacatcaacccagtggctgcctccctcatccagaaaatgcttcagacagaccccgctgcgcgccccaccattcacgagttgctcaatgacgagttcttcacttccggatacatccccgcccgtctgcctattacctgcctcaccatcccaccaaggttttcaatagctcccagcagcctagaccccagcaacaggaagcctctcacagtccttaataaaggtgtggagaaccccctgcctgaccgtccccgagagaaagaggaaccagtggttcgggagacaaatgaggccatcgagtgccaccttagtgacttgctacagcagctgaccagtgtcaacgcctccaagccctcagagcgagggctggtgcggcaagaggaggccgaggatcctgcttgcatccctatcttctgggtcagcaaatgggtagactattcggacaagtatggccttggttatcagctatgtgacaacagtgtgggagtgctctttaatgactcaacacgcctcatcctctacaatgacggggacagcctgcagtacatagagcgtgatggcacggagtcctacctcactgtgagctcccaccccaactccttgatgaagaagatcactctcctcaactatttccgcaattacatgagtgaacacctgctgaaggcgggggccaacatcacgccccgggaaggcgacgagctggcccggctgccctacctacgaacatggttccgcacacgcagcgccatcatcctgcacctcagcaatggcacagtacagattaatttcttccaggaccacaccaaacttatccgtggccccctgatggcagcagtgacctacatcaacgagaagagggacttccggacataccgcctgagccttctggaggaatatggctgctgcaaggaactggctagccgcctccgctatgcccgcaccatggtagacaagctgctgagctcgcgttccgcctgcaaccgcctcaaggcctcctaggtctccgtccttcggactggtgccccttcattctgctagctctctgctagctctgggcctgcactactgggctcctggggccgctgttcagtgccctggccctggggctggcagggagcagtgcccctgtgaagggttgctgtgtgtaagttattttgtacatgattgggtgtggtttgcagcctgttccctgcccttggcccactgtatgaactgtataaatatttctattgaatttgggactgccctttccttagctttatatatattaaatatttgtacatctctctctaaaaaaaaaaaaaaagggcggccgctct

SEQ ID NO: 4097 - DNA, 2207 bp, Rattus norvegicus
  Genbank Accession No. U10357
gtctcccggctgtgcttggccgtgcggagggccggtgccagcacctccagctccgggacagcagcgggagccaagcccgagccgcaggcgtcgtcgccatgcgctggttccgggcgctgttgaagaatgcgtccctggcaggggcgcccaagtacatcgagcacttcagcaagttctccccgtccccgctgtccatgaagcagtttctagacttcggatccagcaatgcctgcgagaaaacttcattcaccttcctccggcaggagctgcccgtgcgcctggccaacatcatgaaagagatcaacctgcttcctgaccgggtgctgagcaccccctcagtgcaactggtgcagagctggtatgtccagagtctgctggacatcatggaattcctggacaaggaccccgaggaccaccggaccctaagccagttcactgatgccctggtcaccatccggaaccggcacaatgacgtagtgcccaccatggcacagggagtgttggagtacaaggacacctatggtgatgacccagtctccaaccagaacatccagtactttttggaccgcttctacctcagccgcatctctatccgcatgctcattaaccagcacaccctcatctttgatggcagcaccaacccagcccaccccaaacacattggcagcattgatcccaactgcagcgtgtctgatgtggtgaaagatgcctatgacatggctaagctcctgtgtgacaagtattacatggcttcccctgacctggagatccaggaagtcaatgccaccaacgccacccagcccattcacatggtctacgtcccctcccacctctaccacatgctctttgaactcttcaagaatgccatgcgggccacagtggaaagccacgagtccagcctcactctccctcccatcaaaatcatggtggccctcggtgaagaagatctgtccatcaaaatgagtgaccgaggcgggggtgtccccttgaggaagatcgagaggctcttcagctacatgtactctacagctcctacaccccagcctggcactgggggtaccccgctggctggctttgggtatggactccccatttcccgcctctacgccaagtacttccagggggacttgcagctcttctctatggagggctttgggacagatgctgtcatctatctgaaggccctgtccacggactcagtggagcgcctgcctgtctacaacaagtctgcctggcgccactaccagaccatccaggaggccggtgactggtgcgtgcccagcacagagcccaagaacacatcgacgtatcgggtcagctaggggccttctcttcctggcacctgggaggatgctgccacctctgaatccagccaccacagggacttccctatctatcccctggggtacgggggtgaaactgggtctccccgatggccagatctgtctttgtagaaatcgcagtggcccatctgtggcgatccctaagtgccaatctgtctctatggagaaacctagggggtttccctggagcctggtctccatggtgatgatgcttgagggttggggacggctctacctggtggggtggccccagagacacttctcccaagaccagagctgtctgttttctaccagaaaccctgggtccccctcactgcctgcatagtcctggtctcccacgtggctgcctcgcttgccttatgcccacaccctgtacaggcacattgggctggtttcttcgtcagtagtaagaaagatggagagagactggggaaacgggggccaaccttgtctctggtcctgcagcctctctccatctccactctggacactaaagttgccactgggaacttgagaatgggtggccgttctcacccaaggcccaccgagaaggcctaagagtaacctgtccccaaggcgatcttagcaatgtttctgccgcttcctggcctggcatgtcctcacgtgtatacctcccctgcccagtgtacgctcaccctatccctgcttgagctttagaccccagacttcctatgcccactatgtgtgcacagacgactcaaacccaggatgccccatgtacatagccagttttgtaatctcagatgcctcacccttgccctccgcacacaggggttaaagccgtgtgcccctcccagtggctgggatggtgacagtgacatccacagtaaatagatgaaatga

SEQ ID NO: 4098 - DNA, 1885 bp, Rattus norvegicus
  Genbank Accession No. U10697
cgtgtccatgcaagatgtgcctcagcttcctgttcctggtgtccctagcaacctgtgtggtttatggaaacccctcttcaccacccgtggtggacaccacgaaaggcaaagtcctggggaagtacgtcagcttagaaggagtcacacagtctgtagctgtcttcctgggagtcccttttgccaagccccctcctggatctctgaggtttgctccaccacagcctgcagagccctggagcttcgtgaagaacaccaccacctatccacctatgtgctctcaagatgcagcaaaagggcagaggatgaatgatctcctaaccaacagaaaggagaaaatccatctcgagttttctgaagattgtctctacctgaatatttacactcctgcagactttacaaagaatagcaggctgccagtcatggtgtggatccatggaggtggaatgacactgggcggggcatcaacctatgatggccgggtcctctctgcctatgaaaacgtggtggtagtggccattcagtatcgcctgggcatctggggattcttcagcacaggggatgaacacagcaggggaaactggggtcatttggaccaagtggctgcgctgcactgggtccaggacaacattgccaactttgggggtgacccagcgtctgtgaccatctttggagagtcagcaggaggtttcagtgtctctgttcttgtgttgtccccactgaccaagaacctcttccacagggccatttctgagagtggggtggtcttccttactggattgttaaccaaggatgttagaccagccgctaagcaaattgctgatatggctggatgtgaaaccaccacatctgccatcattgttcactgcctgcgtcaaaagacagaagaggagctcttagagatcatgaagaaaatgaatctgattaaactcagttcacaaaggataacaaaagagagctaccactttttgtcaactgtggttgacaatgtagtgctgccgaaggacccaaaagagatcctggctgagaagaacttcaataacgtgccctacattgtgggaatcaacaagcaagaatgtggctggcttctgccaacaatgatgggatttgtaccagctgatgtagaattggacaagaagatggccattacgctcctggagaaatttgcttccctatatggtataccagaggatattattccagttgccattgagaagtacagaaaaggtagtgatgactccatcaagatcagagatggaatccttgcctttattggggatgtgtcatttttctatccatcagtgatggtgtcccgtgaccacagagatgctggagctcccacctacatgtatgagtatcaatactacccgagcttctcatcaccccaaagacccaagcatgtagtaggagaccatgcagatgatctctactctgtctttggtgccccaattttaagagatggtgcctcagaagaggagatcaagctcagcaagatggtgatgaaattttgggccaactttgctcggaatgggaaccctaatgcgcgagggctacctcattggccacagtatgaccagaaagaagaatatctgcagattggtgccaccacccagcaatcgcagagactgaaagcagaggaagtggctttttggacacagttactggctaagagagaacctcagccccaccacaacgagctgtgaatgcaagtctctgtcagcttcagaacaagcaagccaagatattgttcttccagtaaagatgtttgtaaatgaaagatggatctggaggatcctgaagaattttgtaatagagacagggagaacccaggaaagagaaatatttgtacttggcatcaatttagagaataaatgacattttcaggtca

SEQ ID NO: 4099 - DNA, 1723 bp, Rattus norvegicus
  Genbank Accession No. U11685
taatgtccagggctccaggaagagatgtccttgtggctggaggccgcagtgcctgatgtttctcctgactctgcaacggagttgtggaagacagaacctcaagatgcaggagaccagggaggcaacacttgcatccttagggaggaagccaggatgccccaatcaactgggggtgctttaaggatagggttggagtcatccgagcctacagccctgctccccagggcagagaccctcccagagcctacagaacttcgtccacagaagcggaaaaaggggccagcccccaaaatgctggggaacgagctatgcagtgtatgtggggacaaggcctctgcgttccattacaatgtgctgagctgcgagggctgcaagggattcttccgccgcagtgtcatcaagggagcacgctacatttgccatagcggtggccactgccccatggacacctacatgcggcggaaatgccaggagtgtcgccttcgcaaatgccgccacgcaggcatgagggaggagtgtgtcttatcagaagaacagatccgcttgaagaaactgaagcgtcaagaagaggagcaggctcaagccacatcggtgtccccaagggtttcctcaccgccccaggtcctgccacagctcagcccagaacaactgggcatgattgagaagttggtggctgcccagcaacagtgtaacaggcgctccttctctgaccgacttcgagtcacgccttggcccattgcacccgaccctcagagccgggaagcccgccaacagcgctttgcccactttactgagctggccatcgtgtccgtgcaggagattgttgactttgccaaacagctccctggcttcctacagctgagcagggaggaccagatcgccttgctgaagacctctgcgatcgaggtgatgcttctggagacatcgcggaggtacaaccctgggagtgagagcatcaccttcctcaaggatttcagttacaaccgggaagactttgccaaagcagggctgcaggtggagttcattaaccccatctttgagttctccagatccatgaatgaactgcaactcaatgatgctgaatttgctctgctcatagccatcagcatcttctctgcagaccggcccaacgtgcaggaccagctccaagtagagagactgcaacacacatatgtggaggccctgcatgcctatgtctccatcaaccacccccacgaccgactgatgttcccacggatgctaatgaagctggtgagcctccggactttgagcagcgtccattcagagcaagtgtttgcacttcgcctgcaggacaaaaaacttccccctctgctctccgagatctgggatgtccacgaatgactgtttctccgtgtcctctgtgttggccacgcagctgaagcttactgactgcttcctagaggtggagcagactgaggagggcaaacattcctgggcgctgggtgaaagagacccttgcatggcactaaagagagtcaaagggttgggtgttttgtggctgctgggcagttggggacctactaacgttgtatgccatctgaaggccttgttgacccaaccaaataaactagccaggagagccactttgtgcagggttcttcaggccctgcccaaaaaaaaaaaaaaaaaacgactaacgttgtatgccatctgaaggccttgttgacccaaccaaataaactagccaggagagccactttgt

SEQ ID NO: 4100 - DNA, 915 bp, Rattus norvegicus
  Genbank Accession No. U13176
aattccgcgccggccccttccccgtccctcccccgtccccgtccccgcccggccagccgccaccgtttcccaccatggctctgaagagaatccacaaggaattgaatgacctggctcgagatcctccagcacagtgttcagcaggtcctgttggagatgatatgtttcattggcaggctacaataatggggccaaatgacagcccctatcagggtggagtatttttcttgactattcatttcccaacagattaccccttcaaaccgcctaaggttgcatttacaacaagaatttatcatccaaatattaacagtaatggcagcatttgtcttgatattctacggtcacagtggtctccagcactaactatttcaaaagtacttttgtccatctgttctctgttgtgtgatcccaatccagatgatcctttagtgcctgagattgctcggatctacaaaacagatagagaaaagtacaacagaatagctcgggaatggactcagaagtatgccatgtaattaaagaaattattggataacctctacaaataaagctaggagaactctgaaagagagaaagtccttttgatttccatttgactgctttctatgagcccaccgcctcatcttcccctgtgcacatgtttacctgacacagcagtgctgcgttgttgtacatacttggaacaacaaactagaaatactgtacttctgtaccaacattgcctcctagcagagaagtgtgtgtgtgagaagccagttctccgggcgtaacctaggcctatttcgatgtaagggtgaacattcatttgatggaaacacttgtgtatatttaaagacccagtgcttcctctggagcttgtacgttcaagaatgattaatctgtgtaataaactgattactacagtcattacgg

SEQ ID NO: 4101 - DNA, 2807 bp, Rattus norvegicus
  Genbank Accession No. U14746
ccgcgttaaagccggacggagtacttctattgctggcagacctgccccggagcgcgtaaacccgcacgctcgcgccgcccacgtccagctcgcgaatccggaggcgtccggttccaataatgccccggaaggcagctagtccagaggaggcagaaaggatgccgggctctgaagagatagaggctgggcggccgcggccggttttacgctctgtgaactcgcgcgaaccctctcaggtcatcttctgcaaccgcagcccgcgcgtcgtgctgcctttgtggctcaactttgatggtgagcctcagccctacccgaccttaccaccgggcaccggccgccgcatccacagctaccgaggtcacctttggctcttcagggatgcggggacccatgatggacttctggttaaccaaacggaactgtttgtgccatccctcaatgttgatggacagcctatttttgccaacatcacattgccagtgtataccctgaaagagcggtgccttcaggttgtacggagcctggtcaagcctgagaactacaggaggctggacatcgtcaggtcgctctatgaagacttggaagaccacccaaatgtgcggaaagacatacagcggctgacccaagagcacctcgagaatcaggccctgggagaggagcctgaaggagtccactgagattacttggtcctgaatttcggccttgatggtctgaaatcgatctacacataggacaggtcactttctttcggttttaaaatggttcattcttggagtaaaatatccatcatgtaaaagaaagttaactaacatcactgagctttgtagtgtttaagactaaacctgcaaagtgccaccgagtctgccctttctagagcattcatcagaagaagctgttttcagttttgcttcctagtaaggctggatgttcagcataaggatgttagtgtgagcgattcgcgaggagttgctctgtgtcctctaatctgaagaatacagcctcgtatgaacagagccccaccgctcacttggggaaggctgagaaggccctaatgctgggatggacatcctgtagaggcccagtgcctaatgtgtgtggagtcttcagtcagtgttggaggaacaaaccattgggtacttagtgggagagttggagggcctggctctctgtctgaggaaatcttaagtgtacacgtaaaggaacaacttagcagcttctgtttagaaagaactttctcttgagtttccatgtctcagcactttctttctactttgttagtttattttattttatttttgagacttgtgtagcccaggtcagcctcagtcactccggaggggatgctggtcttgaattccggatcctctgggagtgtgtcagcattgggagcacatgggtcgaccacagtctgctctgttcttgcttttcccattttgagacgggctcatactgtagccctgcctggcctcaagctagagtcagccctgtctccccacccagtctggctgcttagactgggtgggcttcccatattcactgccccagacagcagagacgagctgtccttgtgtttaggtctggttttgagagttccttctctgaggaagctgctggcaggagcagggtttctgttccttcccgtcagcccctagcattccagctgggcgccgcactctgctttggcaggcgctagttatgcttcgatgggagaggggagtgaagctccctcagccacacactccaaaccatgggtcccagagcagtctgcaatgagtagtagtttgtgggcagtcacagcttttcttacatattcaaatattgatgttcactacttctatcaaacattttgtagaacataattttttatttgtttttaattcctcagcagagaaaaatgagagaagcttgggcattgtgtgtggcacacaccagaaaggacagtcagctgagagggtgcagaaaggctcttgtgcgctggctctcagctgcatgtagtcctgtaacccagtgttctctctagtacacattttaattggttaaagcactttgtcctggccgagatcataaggtatatacagttttgtggcctgatttttcattgaacttcattgttttgttttcccctctttttcgtttttggttttgtttttggtttgttttttgctttttgttttatcaagatagagtttctctgtgtagcccaggctgtcctggaactccctttgtagaccaaacaactgattactggcctcaaacggagatctgtctgcctctgcctctccagtgctgggattgaagtatgcctaatcttcatctaacttagtaacttgtcttttccatgttactgcacacactgtctaaattccggtgtgctagcctctccctttgagggtgactgttgggagtatttgtctcagtcctgggctccttgagtgcagtctgatgctctaagatcagcaaaatcactgaacttaatactgacactcctgccgccctctcagcgtctctccttagtctgcagcattccgtgagtgaagcggcacaggccagtgtggagcctgtgtgtgggaagtcagcaggtgccgagctattgcaacattggttttattttttaagcctatctctgtctctaaaagatgtaatgtttgtcttatttaactggaagtttgaatactgttctctgtgccttaggacatgagtcacttgtccttgcacatcctgtaagtgtgttcctcagactttgtactctcctttgagttctctgaaaaagctgacctttagtacaataaacggtgctaagtgaagga

SEQ ID NO: 4102 - DNA, 1626 bp, Rattus norvegicus
  Genbank Accession No. U16253
gcggcccctcatctccgtgagccccgaggcttctcttggccaaggtcctaggagtgatccgattgagagcggcgccccaaagctgccgggctggccggggtgggcggggaggcacctggacgctgcactctctggtggctccgcgtcgcgccaggtccctcgcagccacgcggggcgcgcactcccactcccaacgcgcgcggctccggagcgcaatggacgcggcgctgctcctcagcctgctggaggccaactgcagcctggcactggccgaagagctgcttttggacggctggggagagcccccggaccccgaaggtccctactcctactgcaacacgaccttggaccagatcgggacctgctggccccagagcgcgcctggagccctagtggagagaccatgccccgaatacttcaacggcatcaagtacaacacgacccggaatgcctacagagaatgcctggagaatgggacctgggcctcaaggatcaactactcacactgtgaacccattttggatgacaagcagaggaagtatgacctgcattaccgaatcgccctcatcatcaactacctgggccactgtgtttccgtggtggccctggtggctgctttcctgcttttcctagtgctgcggagtatccgctgcctgcggaatgtgatccactggaacctcatcaccaccttcatcctgagaaacatcacgtggttcctgctgcaactcatcgaccacgaagtgcatgagggcaatgaggtctggtgccgctgcgtcaccaccatattcaactactttgtggtcaccaacttcttctggatgtttgtggaaggctgctacctgcacacggccatcgtcatgacgtactccacggagcatctgcgcaagtggctcttcctcttcattggatggtgcataccctgccctatcattgtcgcctgggcagttggcaaactctactatgagaatgagcagtgctggtttggcaaggaacctggtgacttagtggactacatctaccagggccccatcatcctcgtgctcctcatcaattttgtgtttctgttcaacatcgtcaggatcctgatgacaaaactgcgagcctccaccacatccgagaccatccagtacaggaaggcagtgaaggccaccctggtcctcctccccctgttgggcatcacctacatgctcttctttgtcaatcctggagaggacgacctgtcacagattgtgttcatctacttcaactctttcctgcagtcctttcagggtttctttgtgtccgttttctactgcttcttcaatggagaggtgcgctccgccctgagaaagcggtggcaccgttggcaggaccaccacgccctccgagtgcctgtggcccgggccatgtccattcccacatcgcccaccaggatcagcttccacagcatcaagcagacagctgccgtgtgatcccctgtcacccatctgcccagcactccaccaccgaggcggcttcctcattcttcacagccttccctgggtcctccttgctacactgacccttgggtgcaggagaagggggggtggatgaactctcctgccggaagaaaggaaaactatgaaatggaggctctgaaagaccagg

SEQ ID NO: 4103 - DNA, 6152 bp, Rattus norvegicus
  Genbank Accession No. U17837
gccaagatggcggcggcgcggccgcgggcgccagggcgacggcggcggctgaggctctgggctcgctgaagcgttggcacgtcgcgctctgggctcatgtaatcaaagaagtttctttgttgtgtgtatcttcacagaacacaacaggaattgaaaatgcatcagaacactgagtctgtggcagccactgagactctggctgaggtacctgaacatgtgcttcgaggacttccagaggaagtaagacttttcccatctgcagtcgacaagactcggattggtgtctgggctactaaaccaattttaaaagggaaaaagtttgggccatttgttggtgataagaagaagagatcccaggttaggaataatgtgtacatgtgggaggtctactacccaaatttggggtggatgtgcattgatgccaccgatccggagaagggcaactggctacgctatgtgaactgggcttgctcaggagaagagcagaatttatttccactggaaatcaacagagccatttactataaaaccttaaagccaatcgcgcctggcgaggagctcctggtctggtacaatggggaagacaaccctgagatagcagctgcgattgaggaagagcgagccagcgcccggagcaagcggagctccccgaagagccgcagagggaagaagaaatcacacgagaacaaaaacaaaggcatcagaacccaccccacacagctgaaggcaagtgagctggactctacctttgcaaacatgaggggctctgcagaaggtccaaaagaagaggatgagaggcctttggcttcggcacctgagcagccagcccctctgccggaggtggggaaccaagatgcagttccacaggtggccatccctctccctgcctgcgagccacagccagaggtagatgggaaacaagaagtcacagactgtgaggtcaatgatgtggaggaagaggagctggaagaggaagaggagctggaagaggaggaggaggaggagttgggagaagatggggtagaagaagcagacatgccgaatgaaagctctgcgaaagagccggagatccggtgtgaagaaaagccagaagacttattagaagagccacagagcatgtcgaatgaagctcgtgaagactctccagacgtgacccctcctccccacactcccagagctagagaggaggccaacggtgatgtacttgagacatttatgtttccgtgtcagcactgtgaaagaaaatttgcaacgaagcaggggctagagcgtcacatgcacatccacatttctaccatcaatcatgctttcaagtgcaagtactgtgggaaacggtttggcacacagattaacaggaggcggcatgaacggcgccacgaaacggggttgaagagaagacccagcatgactttacagtcctcagaggatccagatgatggcaagggggaaaatgttacttctaaagatgagtcaagtccacctcaactcgggcaagactgtttgatattgaactcagagaaaacctcacaggaagtactgaattcatcttttgtggaagaaaatggtgaagttaaagaacttcatccgtgcaaatactgcaaaaaggtatttggaactcacaccaatatgagacgacatcagcgtagagttcatgagcgccacctgattcccaaaggtgtcaggcgaaaaggaggacttctggaagagccacagccaccagcagagcaggctccaccctcccagaatgtctatgtcccaagcacagagccagaggaggaaggggaaacagatgacgtgtacatcatggacatttctagcaacatctctgaaaacctaaattactatattgacggtaagattcagaccaacagcagcactagtaactgtgatgtgattgagatggagtctaattctgcacacttgtatggcatagactgtctgctcactccagtgaccgtggagattactcagaacataaagagcactcaggtctctgtgacagatgatcttctcaaagactctcccagcagcacaaattgtgagtctaagaaacggaggactgccagtccacctgtgctccccaaaattaaaacggagacggagtctgattccacagcaccctcgtgttccttaagtctgcccctgagcatatccacagccgaggtggtgtccttccataaagagaagggcgtctatttgtcgtccaagctcaagcagcttcttcagacccaggacaagctgacccttcctgcagggttttcagcagctgagattcctaagttaggtcccgtgtgcgcgtctgctcctgcatccatgttgcccgtgacctctagtaggtttaagagacgcaccagctctccaccgagctctccacagcacagccctgcccttcgagacttcgggaaaccaaatgatgggaaagcagcatggacagacacagtcctgacttccaagaaacccaagttagaaagtcgtagtgactcaccagcatggagtttgtctgggagagatgaaagagaaaccggaagccctccttgctttgatgaatacaaaatatcaaaggaatgggcagccagttctactttcagcagtgtgtgcaaccaacagccattggatttatccagcggggtcaaacagaagtcagagggcacaggcaagactccagtcccatgggaatctgtattggatctcagtgtgcataaaaagccttgcgattctgaaggcaaggaattcaaagagaaccatttggcacagccagctgcaaagaagaaaaaaccaaccacctgtatgcttcaaaaggttcttctcaatgagtataatggtgttagcttacctacagaaaccacaccagaggtgaccaggagcccaagtccttgtaaatccccagatacacagccagatcctgaacttggtcctgactcaagttgctcagtccccactgctgagtctccacctgaagttgttggcccttcctcaccccctctccagacagcctccttatcctccggtcagctgcctcctctcttaacccccacagagccttcttcccctcccccctgccctcctgtgttaactgttgccactccaccacctcccctccttccaaccgtccctctctcccacccctcttctgatgcctcccctcagcagtgtccctctccgttctcaaacaccactgctcagtctcctcttcccattctctccccaacagtgtctccctctccctctcccattcctcctgtagagccacttatgtctgctgcttcccctggtcccccaacactttcttcctcctcctcttcttcctcttccttcccttcctcttcctgctcctccacctccccctccccaccccctctttcagcagtgtcatctgtggtttcctctggggacaacctggaggcatctctgcctgcagtaactttcaaacaggaggagtcagagagtgaaggtctgaaacccaaggaagaggccccacctgcagggggacagagtgtggtccaagaaacattcagcaaaaacttcatttgcaatgtctgtgaatcgccttttctttccattaaagacctaaccaaacatttatccgtccatgctgaagagtggcccttcaaatgtgagttttgtgtgcagctgtttaaggttaagactgatctatcagagcatcgatttctgcttcatggggttggaaatatctttgtgtgttctgtatgtaagaaagaatttgccttcttatgcaatctgcagcagcaccagcgtgatctccacccagatgaggtatgcacacaccacgagtttgaaagtgggaccctgaggccccagaacttcacagaccccagcaaggccaatgttgagcatatgccaagtttgccagaagagcctttagaaacttctagagaggaggagttaaatgattcctctgaagagctttacacgaccatcaaaataatggcttctggaataaagacgaaggatccagatgttcgacttggtctcaaccagcactacccgagctttaaacctcctccatttcagtaccaccatcgaaaccctatggggataggggtgacagccaccaacttcaccacccacaatattccacagactttcactactgccatccgctgcacaaagtgtgggaagggcgtcgacaatatgcctgagctgcataagcatatcttggcgtgtgcgtctgcaagtgacaagaagaggtacacccctaagaaaaacccagtgcccctgaaacaaactgtgcagcccaaaaatggagtggtggttctagacaactctgggaaaaatgccttcagacggatggggcagcccaagagactgagcttcaatgttgaactgggtaaaatgtctccaaacaagctcaagctgagtgcgctgaagaagaaaaaccagctggtgcagaaggccatccttcagaagaacagagccgcgaagcagaaggcggacctgagggatacttccgaggcgtcctcacacatctgcccgtactgtgacagggagttcacatacattggcagcctgaataagcatgccgccttcagctgtcctaaaaaacctctttctccttccaaaagaaaagtttcccattcgtctaagaaaggtggccatgcatcatcttctagcagtgacagaaacagcagctgccacccccggaggcggactgcagataccgagatcaagatgcagagcacgcaggcacccttgggcaagaccagagctcggagtacaggccccgcccaggcctcactgccctcctcgtccttcagatccagacagaatgtcaaatttgcagcttcagtgaaatccaaaaaagcaagctcttcatccttgaggaattccagtcccataagaatggccaaaattactcacgtcgagggcaaaaaacccaaagctgttgccaagagtcattctgctcagctctcaagcaaatcctcccgaggcctgcatgtcagagtgcagaagagcaaagctgtcatacagagcaagactgccctggccagtaagaggagaacagaccggttcatagtgaaatctagagagcgcagcgggggcccaatcacccgaagccttcagctggcagctgctgcggacctgagtgaaagcaggagagaggacagcagtgccaggcatgagctgaaggacttcagctacagtctccgcctggcatctcgatgcggctcatcaacagcctcttacatcaccagacaatgcagaaaggtcaaggccgccgcagcaactccgttccagggacccttcctcaaagagtaggcactctgtctgctccttaacagcacctgaagtgacctggaatcagtgaagccaaagggaccagcagtctgccctgcagagagcactgacctctcccagttgtgagagtgagagaacgagagagagagagagagagagagagagagagagagagagagagaatgagaatgtgtgtgtgtgtgtgctggtgcatgtgtgtggtcttcaagccaaggtcccagcctcaggagcaggaccttcccatttcccgtcatcctctggatgatccttggacgtggcccagaaccgtgctctgtggtgcagccatcctgcccgggaggggcatctccttctatgcaatttttttaaagagttccttggccctgctttgtgcttcttgagctgtccgtttgccaccactgggacttggatctggccctgaggggtggggaagagggcctatctaaggataacctttcagaggtcaagctccccttcatgccacccctcccccctgccctcaccgaccttttccccacactgtctctgggaatcaatagcagatagcatatagatccatcagggttgagcctgaacctcggccctagcactaggaaatcccccttttctccctaagcaactggagccgccagctttcaagtcatttcctcctttgaggttctagagtccgagagtctgctccgaagtctctcctgggaacccgggagccctcgcacccaggacgcagactctgtgcccattcttagacctgaggtagaagaagcagtgttttgggacgatagggtggaggcgtgcctactttgtctcctctggtgggacctcctacatcattggcatctgaaccttgcaagttcgctgcaaagagaagcaaagga

SEQ ID NO: 4104 - DNA, 660 bp, Rattus norvegicus
  Genbank Accession No. U19485
ttcccggtgtatgactatgacccttcctctctgcaagaagctctcagtgcctcagtggctaaggtgaactcgcaatccctgagtccttacctgtttcgggcgacgcggagctccctgaagagagttaatgtcctggatgaagacacactggtcatgaacttagagttcaccgttcaggaaactacatgcctaagagagtctggtgatccctccacctgcgccttccaaaggggctactctgtgccaacagctgcttgcaggagcacagtgcagatgtccaagggacaggtgaaggatgtgtgggctcactgccgctggcgttccacatccgagtccaacagcagtgaggagatgatttttggggacatggcaagatcccaccgacgaagaaatgattatctacttggctttctttatgatgaacccaaaggagagcagttctatgaccggtcgattgagatcacgaggaggggacatcctcctgcccatagaaggttcctgaacctccaacgcagagccagagtcaattctggctttgagtgacatcctggagattccatgaaagaaagagaagcagaagctgaaatgaaggacatggagaattgtgtctttttcctttgataagctccactttgcaataaagatcttccccttcctgta

SEQ ID NO: 4105 - DNA, 2310 bp, Rattus norvegicus
  Genbank Accession No. U19614
tagaatcgaaccgcggaaagtccatcgtccctatcgaccaacagctacgtaaacaactatggcgggagagaggtggcgggccgaggggctgggagaaggatgggccatctacgtcacacccagagcccccatccgggagggaaggcggaggctcgccactcaaaatggcgacgggagtgacgcgcctgcgtacgaaactcatccgtcgcgccacggacgacgggaagtgaggttttcagaagagccgccagaagtgtacggcgacttcgagccccgggcggccaaagaaaggtctccgggggaaagacgaaccccgccagaaaagttccggtcggattctgcgaaagaggaagtgagagaaagcgcttacaatcttcggtctcgacaacggaggcagcggggaccccaggaagccgaggagatgaagacgcggaggtctactcgtctggagcagcactcacagcaggcgcagcagcagctgtcaccggctacgagcgggcgaggattacgggacgctcagtccttaagtgaggaccgcggagaggatgaaccttcttcccaacctgttacaagccaaacagtctcaaagaaaactgtcaggacaccagagacttcagtgatgagtgaagatcctatcagtaacttatgcagacccccattaagaagcccaagacctgacgcttccattgtccaacacatcaacccctttgaggaagatgaagccgcagtagcagccggtcaccatccagactcactgtgggggttaccacacagtcggggggacttcacagctcatgagaatcaaccctcactgctgcccacaggatgtcaaaaaaaccctcaagagtgggttgaacaagctgtgagaatgaggactagaatggcatataacaacattcagaaatcagactttggaaaccaatctccatcaacctccaggcaacaagcagctgtacaacccccagatgagtcttctgtcaagataaaatggtggctgctgatacttgttgctgctctggccatgggaatatattggttctttcatactcctgtagtagaaatcactgcagctcaggatgctgcggaagtgctcaagtgtctgagtgaacagatcgccgatgcctactcttccttccgcagtgtccgtgccatccggatcgacggagcaggcaaagctgctcaagacagtgacctcgttaagcacgaagtcgatcaggaactgacagatggatttagaaatggccagaatgcagctgtggtccaccgcttcgaatccctgcctgcaggctcaaccttgatcttctataaatactgtgaccatgaaaacgcagccttcaaagatgtggccctcgtcttgacggtactgttggaggagcagacgctggaagccagtctaggcctaaaggaaattgaggagaaagtgagggatttccttaaagtcaagttcaccagctctgacacggccaactcctacaaccacatggacccagacaagctcaatggactctggagccgcatctcccacctcgtgctgcccgtgcagcctgagaatgctctgaaagcaggcagctgcttatgagggaaagaagcggaaatcctgtctcgagtttgaaccattttcagactttgtaaccagagacggattttggagcagtttttgaaaactggtttctttttaaaggaagtaaagttcatacataaaggtggaataactaaatcatttatgcagcctacttctctgtgatttgggagaatcgtttttctatttccacctagaaccatgttaaagatatttagcatagtgcacagtatatgcagtccccgagtgtctgctaccttgattctggccgaatcattcttgctgtgtgaccagcgagaagggctaggttcctctctcaagcaatcagctttctattgaattttggatttgtgtttgtgaccttattaatgtctgacaaccccctaattgtagctatggatttccctgttacttcttctctcataccattgaaatgtgtggtccttagtttctacctataaaaataaaactgggtgtgcagtttagccagcccctcccccactggtttgtagagagggagacaagggtgtgggaggtagaaagagaagagaaattgtttaatagggaagggaaggaaggaaggtaaaaagatgttgcaagctgggcatggtaagccagcctgttatcccagtattgtcccagtagtcaggaggagcagaggttcaaggtcagcctcatctatagagtgagttttctgccacctggactacatgagacactgtcttaaaaac

SEQ ID NO: 4106 - DNA, 3770 bp, Rattus norvegicus
  Genbank Accession No. U20181
tgaggccggcgatggactccccaagtgcaggatacacctttgagtaccttattgaaacattaaatggcagttcacagaagaagttcttcaatgtacctaaacttggaggcaccaagtatgatattctgccttactcaatacgggtcctattggaagctgctgtacgaaattgtgatggatttttaatgaaaaaggaagatgttataaatattttggactggaaaaccaaacaaagcaatgttgaagtgccctttttccccgcccgtgttgttcttcaagatttcactggaataccggcaatggtggattttgctgctatgagggaggcaatgaaaactcttggaggtgatcctaagaaagtccaccctgcctgtccaacagatctcacagttgaccactctttacagattgacttcagtaaatgtgcaatacagaatgcaccaaatcctggaggtggtgacctacagaaagcaggaaagctctctccacttaaagtacagcctaagaagcttccatgtcgaggccagactacctgccggggatcgtgtgattctggagaactaagccgaaactcaggaacattttcttcgcagattgagaatacgcctgtcctgtgtccctttcatttgcaaccagtgcctgaacctgagacggtgttaaaaaatcaagaagtagaatttggcagaaatcgagagaggcttcaatttttcaagtggagctcaggagcttttaagaatgtggcagtcatccctcctggaactggaatggctcatcaagtgaacttagaacatttgtcgagagtagtgtttgaagaagccgacctgctcttcccagacagcgtaattggcacagattctcatataaccatggtgaatggattgggaattcttgggtggggagttggaggcattgagacagaggcagttatgcttggcctgccagttactcttactttaccagaggtggttggatgtgagctaactgggtcatccaatgcttttgttacatccatagatattgtcctaggcattacaaagcacctcaggcaagtaggcgtggctggaaagtttgttgagttctttggaagtggagtttcacaattatctattgtcgatagaactactatagcaaacatgtgtcccgagtatggtgctatcctcagctttttccctgttgacaatgtgacactacgacatttagaacatacaggttttgacaaaaccaaacttgagtcaatggaagaataccttaaagctgtgaaattgtttcgaaatgatgagaattcttcagaacctgaatattctcaggtgatacagattaatctgaattcaatagttgcatctgtcagtggtccaaaaaggcctcaggatagagttgctgtaacagatatgaaaagtgattttcaggcttgcttaaatgaaaaggttggatttaaaggcttccaagttgcagcagaaaaacaaagtgatactgtctcagttcgttatgatggaagtgagtataagctgtcccatgggtccgtggtcattgctgcggttatcagctgtaccaataactgcaatccatcagtgatgctcgctgcaggtcttttggctaaaaaggctgttgaaactggtctacgagttaaaccttatataagaacaagtttgtctccaggcagtgggatggttacacattacctcagttcaagtggagtgttaccctaccttagcaagctagggtttgaaatagttggctatggatgttcaacgtgtgtaggaaatacagcacctttatcagaagcaattttgaatgcagtaaaacagggtgatttggctacctgtggagttttatctggaaacaaaaatttcgaaggtcgtctttgtgattgtgtccgtgctaattatctcgcctctccacccttagtggtggcttacgccatagcaggcacagtgaatatagatttccagacagagccattaggtactgactctacaggcaagaacatttacctgcatgacatttggcctagtcgagaagaagttcatcagatagaagaagaacatgttattttgtccatgtttaaagcactgaaagagaaagtagagatgggaaataaacggtggaattccttagacgctccagattcagtgttgtttccatgggatgttaagtctacttacatcagatgcccttcattttttgataaacttaccaaagaaccagctgcatcccagcctattgaaaatgcccatgtcctgttgtacttgggagactctgtcactacagaccacatatcacctgctggaagcattgctaggagcagagctgctgctaagtacttgacaaacagaggccttactccccgagagttcaactcttatggagctcgaagaggtaatgatgctgtgatgacaagaggcacgtttgcaaacatcaagctttttaataagtttattgggaagccagctcccaaaacaattcattttccatcaggacagacgctcgatgtatttgaagctgcagaattataccaaaaagaaggtatcccactgataattttagcaggaaaaaaatatggttcaggaaattcaagagactgggctgcgaaaggaccctatttgctgggtgtaaaggctgttttggctgaaagctatgaaaagatacacaaagatcatttgattggaattggtatagcaccacttgagttcctcccaggagaaaatgcagattccttgggcctctccggcagagaagtattttctttatcatttcctgaagaactctttcctggaattacgttaaatataaagacgagcactggcaaagagttcagcgtgattgcagcatttgaaaatgatgtggagataactttgtacaaacatggaggattgttaaactttgtggctcgaaaattcttatagtatctactccccatggtatctttcatggctggtaactgcaaagccttcttctgtgctggacccaggaatcattgccatggaactgcagatgatttcagtatacttctctcctccatggatgtaaatgataacgaatcaacgtagtgactaaaatgaaatcttgattttaaataatatacgaatggtgctattaacattgctaaaatcaacgtgtgaaggtgtgttgtggaagagacctgtaagtatggggggtatattttatgagaacattttgtaaataaagacagaatttgaacttgtgttgaagattcatatgaatagccgttctaaagctgtttgttttgttttgcaccttaaaactggactactgtttgttggtttaagaatagcaagttgatttagaagaagccagactagatcctaaaattatggaaatgggtacctgatttagaaatgaatttttaaatgtttttctttccagaattgaattggacacaattggcatttccagtttgtaatgtaagtcaggtttggccttagtctcaatacatctgcaaggcatagaacctgccccagatcacagtccctctgaccagccaaaatgtcctccatgtctgcagataaatgactgtaaaatacagctgattgtgtggtaccgtgtattagtaagaatatatttcctgtggtatagccctgtaattttttcagtaacttgccactatgacccactcacaagcccaaatacggtgtattaatttggactagattttgctcattttacatgactgtaactcctgtaacctcaattaggaatcactagctgacattccacactccttttatgactgctggaaacaattgagtcaa

SEQ ID NO: 4107 - DNA, 599 bp, Rattus norvegicus
  Genbank Accession No. U20194
ggaaaggggagatgctgtgcagtacatcccagccatcatcaagtctaaggctgagcccctgtatgaacttgtgacagccacagactttgcgtactccagcacagtgaaacagaacatgaagaaggccctagaagaattccagaaggaggtcagctcctgccgctgtgctccgtgcaggaacaatggagtccccatcctgaaagaatcccgctgtgagtgcatctgtcctgtcggtcttcaaggtgtagcctgtgaggttaccaatcggaaagatatccccatagatgggaagtggagttgctggtctgactggtctccatgctctggaggacgcaaaacaagacaaaggcagtgcaacaacccggcacctcagagaggaggcagcccctgctcaggtcctgcttcagaaacactcaactgttaaagggagggaacacagccggcaggtgatcatcagggctctaaccctctcacacttagccaggctttagcacaccagctcccacccagggctaccacaacaaaaagcaatgccactctgccctttaaaggtttagtttcttcagtgcatgttaattccagtaaacagtgggtggagc

SEQ ID NO: 4108 - DNA, 3628 bp, Rattus norvegicus
  Genbank Accession No. U20796
cgctccaactgtgatgccaacggcaaccccaagaacacggatgtctctagcattgacggtgttctcaagagcgaccgcacagactgtcctgtgaaaacaggcaaacctggtgcccctggcatgaccaagagtcacagcggaatgacaaaatttagtggcatggttctgctatgtaaagtctgtggggatgtggcctcaggattccactatggagttcatgcttgtgaaggctgtaagggcttcttcaggaggagcattcagcagaacatccagtacaagaagtgcctgaagaacgagaattgctccatcatgaggatgaacaggaaccgctgccagcagtgccgcttcaagaagtgtctgtccgtgggaatgtcgcgggacgctgttcgatttgggcggattcccaagcgtgaaaaacagagaatgctaattgagatgcaaagtgcaatgaagaccatgatgagcacccagttcggtggccacctgcagagtgacaccttagcagagccgcatgagcagtcagtaccaccggctcaggagcagctgcggcccaagccccagctggagcaagaaaacatcaaaagcacccctcctccttctgattttgcaaaggaggaagtgattggcatggtgaccagagcccacaaggatacctttctgtataatcaggaacatcgagaaaactcatctgagagcatgccaccccatagaggagaacggattcccaggaatgtggagcaatataatttaaatcatgaccatcgtggcggtgggcttcacagccacttcccctgtagtgagagccagcagcatctcagtggacagtacaaagggaggaacatgatgcactacccaaacgggcataccgtttgtatttcgaatggacactgtgtgaacttctccagtgcttaccctcaaagagtctgtgataggattccagtaggtggatgttctcagactgagagcaggaatagctacctgtgcagcactggagggaggatgcatctggtttgtcctatgagcaagtctccatatgtggatcctcagaaatctggacatgaaatctgggaagaattttcaatgagttttaccccagcagtaaaagaggtggtagaatttgcaaaacgtattcctggcttccgagatctgtctcagcatgatcaggtcaacctgttaaaagctgggacttttgaggttttaatggtgcgatttgcttcgttatttgatgcaaaggagcggactgtcaccttcctgagtggtaagaagtacagtgtggatgacctgcactccatgggagcaggcgatctgctcagctctatgtttgagttcagcgagaagctgaatggcctccagctcagcgacgaggaaatgagcttgttcacagctgttgttctggtgtctgcagatcgatctggaattgaaaatgtcaactcagtggaggctctgcaggaaacactcatccgtgcactaaggaccttaataatgaaaaaccatccaaatgaggcctccatttttacaaaattacttctaaagttgccagatcttcgatctttaaacaacatgcactctgaggaactcttggcctttaaagttcatccttaaggcctttgaacatgaactgatgctaatgtacattttatgctgagatgtttatttatatgtgtataccatattgtgaaaatagaaaaggacttagcgccaggtcctggactgtctgtagtcagtcaccagtagctgttcagatgagaactcattgtcttgttagacattggcccaccctccctgtagaccaaccagctgtgttgcacttagactggagaagttacactgaattataatcacactgaatgttagactttttcatctgccaaagccaaaataccatgttgatctccccggggtataaatctagcgcacattggagatatagggaggacttaaacattacccctgtgtgacaggattcgggtgccccacaagattgatatgtggtaaaggagactgagagacaagaggtgtgctctggcactgacaaagaacatggtcctgggagtcccctgggttgtgggaaatgataattgatagtgtccccaatgtcctgcctcacagagatactgaaaaaatgtccataaagcgtctttacctcttgggagataggcactatgtaaataaggtgaagtttttattataattgctcataataatattcttgtcttatctctaagcatttctgggaaactttgagagtccacaccaatttattcagggttccagctcaagtggggttccctactgataaacacatattccaggtttatggacacgtcagatagtatgtgtacatagtgtgtatgtgaatataattatatataaaatcttacttcacaatattttaaactgtgaagaactttatcatacaataaacttaaacaagaggtgtcaaggacccaaattaggtgcattttacctgttgctgctgatgtataaccattgctttatgatgtttagatggtagaatactgaagttaattctcatatttttgtttaagcaacatttaatgtaaaagtgtaatgagcagtcaaatccaggtcagaaaaaacatggattttagaatacatctttgatacaatctgcagttgaaggtaatagatgtttcagtgtttcagatttctaccttgcgctattaatagaggtggtgttgctgcttcttacctgctgcaggtggatggcagatttggattctgtgtggaggatgttttgtttggggaaaacctttgtgacctattggcatgtctgtgcccaagtccacttttctttctttcccttaaataacactacagggattttgtcaatttagatttaatataatttgaaaaacctttaataagtgacctacctacaggcttagagatcgtggtaggagaggtagccaaagttaaagattcgtgaacaacacccctgttcccccctgagctgtaattcattgtattttgggggcaaaattattttctgtgtaatgctagattatgtgaaattgtaaagacattaagaacatgctttactatttaaagcatgcctattacttttatgacatgtaagcagaatgccttattttgtagttctaacttgttgctacaggatttgaacttctgtggtacagttaagagagcttgaaaaagataaacccctgttgtcgaagaagaaagctgatggtgcgtctgttatgcagtagggaccataactgctgtttacattcagtgggtatggctttcgtgggatacacagctagggtttgtgaattctttacatgatagcattatcattttatatttttttcaaggataaaccaatgcatagttttcttctatgggggatagagagctttgtgaagtaatactgaaaacctcaaaggttatgttgattcttcatttttgcctttttcataagtgtctttataacatgtatctttaaagcagtttgcgtctttggaaatatgtaaccagagctgttagtgttgcttgtgatgcttgagttagggtcagtatatacatgtacacacctagatagaagcatgtagatttgtattttgtctcgtaaaattttatttcaataaattcttcctgaagt

SEQ ID NO: 4109 - DNA, 975 bp, Rattus norvegicus
  Genbank Accession No. U21718
ctgatcaacaacttcagggtgatgggaaaataattgataggagaccagaaaggcgaccacctcgtgaaagaagatttgaaaagccacttgaagaaaaaggtgaaggaggtgaattttcagttgatagaccgatcatcgaacggcctatccgaggccgaggtggtcttggaaggggtcgaggtggccgtggccgtggaatgggccgaggtgatggatttgattctcgtggcaagcgtgaatttgataggcatagtggaagtgatagatctggcctgaagcatgaggacaaacgtggaggtagcggatctcacaactggggaactgtcaaagatgaattaacagagtcacccaaatacattcagaaacaaatatcttataattgcagtgatttggagcaatcaaatgtgactagggaaacacctgaaggtgaagagcacccagtggcagacactgaaaataaggagaacgaagttgaagaggttaaggaagagggtccaaaagagatgactttggatgagtggaaagctattcaaaataaagaccgagcaaaagtagatttaatatccgaaaaccaaatgaaggtgctgatggacaatggaaaaagggatttgttctgcataaatcaaaagttgaagaggctcatgcggaagattcagttatggaccatcatttccggaagccagaaaatgatataacgtctcaactggagatcaatttggggagacctaggccgcccaggacgttgtgggagagagaggacgtcgtggacgtggccgtggtggtcgtcctaatcgtggcagcaggactgataagtcaagtgctttctgctcctgatgtagatggccccagaggcattcccccgctctggcctaactggatgccataatacaacactggttcctttgtggaccctcctgttcaaagcttttgcatgcttacttttgcatgcttaaggatcccaaacaactaagaatt

SEQ ID NO: 4110 - DNA, 428 bp, Rattus norvegicus
  Genbank Accession No. U21719
caccctaacctaaaccttttgaattttgaattaatgggtaccctatagaaaaaatgacctgcggaaaaccaaacagtgaagggaaagaaggaaagaattccaattgacacaatttaaataaaatatggcttttcaaataaaggaagagaagtttcttttgggcacacaatctaaacaatatttatgtataattcagctcttatttggcttaaatgggcttagtgggaaatgttatcatttttactattttctacagagaaaatattttccagtttatcaagtaactctggactttggaattacctgtttttatgttccagctgtctatatagttgtttctctgaaattgtacataaaatgtttttacattaaaatgaattactgtataaagtactgcattatgcataataaagatactaatgctttat

SEQ ID NO: 4111 - DNA, 597 bp, Rattus norvegicus
  Genbank Accession No. U21720
cccaaacccttgctagccagggactgacccctgcttcccacccccaggaccgcctgagccaggtgctacgggacctggaggatgagagcacccctattgtgaagctgggggatgccagcattgcagcacccttcacctccaagctttcctccatccagtgcatctgccacgtgatcaagcagggccgttgcacattggtgacaacgctgcagatgttcaagatcctggccctcaatgccctcatcttggcatacagccaaagtgtcctctacctggagggtgtcaagttcagcgacttccaggccaccctgcaggggctgctgctggccggctgcttcctctttatttcccgctccaagcctctcaagactctttcccgagagcggcccctgcccaacatcttcaacctatacaccatccttacggtgatgctgcagttctctgtccacttcctgagcctggtctacctgtaccgggaggcccaggcacgcagccctgagaagcaggaacagtttgtagacctgtacaaggagtttgagccgagcctggtcaacagcactgtgtacatcatggcatggcatgcagatggtacctttg

SEQ ID NO: 4112 - DNA, 463 bp, Rattus norvegicus
  Genbank Accession No. U21721
cccacctccggctgccggcgacaccggtctttgcagtctgggaccccgtgcgatctttagcccggtgcacgatgcccccgaaaaagggaggagatggacttaaaccgcctccgatcattggaaggtttggaacctcactgaaaattggtactgttggattgccaaatgttgggaagtctaccttcttcaatgtgttaaccaatagtcaggcctcagcagaaaacttccctttctgcactattgaccctaacgagagcagagtgcctgtgccagacgagaggtttgacttccttttgccagtgtcacaagccagcaagcaagattcctgcttttccttaatgttagtgggattattgctgggccttgtgaaaggagctcacaaatgggcaggggtttgggggaattgccttccttcttcaaatttaagggccgtgatggggattttcaccttaacgcgttcttt

SEQ ID NO: 4113 - DNA, 2757 bp, Rattus norvegicus
  Genbank Accession No. U25651
gccagcgaggagagctaaaactacaagagtggatcatgacccatgaagagcatcatgaagccaaaaccctggggatcggcaaggccatcgccgtgttgacctctggtggagatgcccaaggtatgaatgctacggtcagggctgtggtacgagttggcatcttcaccgggctccgcgtcttctttgtccatgagggttaccaaggcctggtggatggtggagagcacatcagggaggccacctgggagagcgtgtccatgatgctccagctgggaggcacggtgattggaagtgcccgatgcaaggacttccgggagcgagaaggacgactccgagctgcccacaacctggtgaagcgggggatcaccaatctgtgtgtcatcggaggcgatggcagcctcactggggctgacacttttcgttcagagtggagtgacttattgaatgacctccagaaagatgggaagatcacagccgaggagcgtacaaagtccagctacctgaacatcgttttcctggttggctcaatcgacaatgacttctgtggcactgatatgaccattggtactgactctgccctgcaccgcattgtagagatcgtggacgccatcaccaccaccgctcagagccaccagaggacatttgtgttagaagtgatgggccgccactgtggatacctggcccttgtcacctctctgtcgtgtggggccgactgggttttcattcccgagtgtccgccagatgacgactgggaagaacacctttgtcgccgtctcagtgagacaagaacccgtggttctcgtctcaacatcatcattgttgctgagggtgcaatcgacaaaaacgggaagccaatcacctcagaagacatcaagaacctggtggtaaagcgtcttggatatgataccagggtcactgttctgggacatgtacagaggggtgggacaccatcagcctttgaccggatcctgggcagcaggatgggtgtggaagcagtgatggcacttttggaggggaccccagacaccccagcctgtgtggtgagcctctctggtaatacggctgtgcgcctgcccctcatggagtgtgtccaggtgaccaaagacgtgaccaaggctatggatgagaagagatttgatgaagccattaagctgagaggccggagcttcatgaacaactgggaggtatacaagcttctagctcatgtcagacccccagtctctaagggcgggttgcacacggtggctgtgatgaacgtgggggccccagctgctggaatgaatgctgcagttcgctctactgtgaggattggccttatccaaggcaaccgagtgctggtcgtgcatgatggctttgagggtctggccaaaggtcagattgaggaagctggctggagctatgttggaggctggactggtcaaggtggttccaaacttggtactaaaaggactctacccaagaagaacctggaacagatcagtgccaacataaccaagtataacatccagggcctggttatcattgggggctttgaggcttacacagggggcttggagctgatggagggcaggaagcagtttgatgagctctgcatcccatttgtggtcattcccgccacggtttccaataatgtcccagggtcagacttcagcatcggggctgacacagcactgaacaccatctgcacgacctgtgaccgaatcaagcagtctgcagcaggcaccaagcggcgagtgtttatcatcgagacgatgggtggttactgtggctatctggccaccatggcaggactggcggctggggctgatgctgcctacatttttgaggagcccttcaccatccgagatctccaggttaatgttgaacatctggtgcagaagatgaaaacaactgtgaagagaggcctggtgctgaggaatgagaagtgcaacgagaactacactactgatttcattttcaacctgtactctgaggaggggaagggcatcttcgacagcaggaagaacgtgcttggccacatgcagcagggtggaaacccaactccctttgacaggaattttgccaccaagatgggtgctaaggctacgaattggatgtctgggaaaatcaaagagagttaccgtaatggacggatctttgccaacactcccgactcaggttgtgttctggggatgcgtaagagggccctggtctttcagccagtgactgagctgaaggaccagacagattttgagcaccgaatccccaaagaacagtggtggctgaagctgaggccaatcctcaaaatcctggccaagtacgagattgatctggacacctctgaccacgcccacctggagcacatttccaggaagcggtctggagaagctgctgtctagaccactttggagtgaggggaaaatcacctgatcatggtcagctcacaccctggtagacctcagcccatggcttctcagtgttgtagcccagcccctacccttctaggtttccctgtactctgtacctgcaaccaggatcactgtggccaggtgttgggggaggggtggtgagtgcctctcctaggtagctgtccttccttgcaccctggcttcatctgtcacacaggctggatgtctctagtgctactgctagatttcagcttctcaagagtaaaagtgagctttatttatttctttgtgataacaaagagtcctaggtcctttccttgtaccacagtgaagtgtaactacactaataaaagccagctggccactgtga

SEQ ID NO: 4114 - DNA, 1700 bp, Rattus norvegicus
  Genbank Accession No. U28504
agtggatggagaccaagtccatcaattagaagataagtctcaaatggagaaccggtgcctccccaagaaagttccaggtttctgttcctttcggtatggactggctatccttttgcacttctgtaacattgtcatcatggctcagcgagtgtgcctgaacctcacaatggtagccatggtgaataaaacagagccaccccatttatctaacaagtctgtagcagagatgctggataatgtaaagaaccctgtgcattcctggagtcttgatattcaagggcttgttctcagttctgtcttcttgggtatggttgtgattcaagttcctgttgggtacctatctggagcatacccaatggagaaaataattgggtcttcattgttcctcagctctgtgctgtccctgctcatcccaccagctgcacaagtcggagcagctttggtcattgtatgccgagtactccaaggaatagcccagggagcagtgtcaacaggccagcatggaatatgggtcaaatgggcacctcccttggaacgaggcagacttacctctatgactctatcagggtttgtaatgggaccatttattgccctgcttgtgagcggcttcatctgtgatcttctgggttggcccatggttttctacatctttggtattgttgggtgtgttctgagtcttttctggttcatccttctctttgatgaccccaacaaccacccatatatgagcagcagtgagaaggattacatcacatcctctctcatgcaacaggtgcactcaggcagacaatctctgccaatcaaagctatgcttaagtctcttccactctgggccattatcctcaatagctttgctttcatatggtcgaacaatcttctggttacatacacgccaacatttattagcaccacgcttcatgttaatgttagagagaatgggctgctgtccagcctcccctatctgcttgcctacatctgtggtatcgtagcaggtcagatgtcagacttcctcctgtcaaggaagattttcagcgtagttgctgtccggaaactcttcaccacactagggattttctgtcctgtgatttttgtcgtgtgcctgctctacctgagctacaacttctacagcaccgtcattttccttacacttgccaactcgacacttagcttttccttctgtggacaacttatcaatgccttggatattgctcccagatattatggatttctaaaggcagtcacagctttaattggaatatttgggggcctaatttcttcaactcttgctgggttgatccttaatcaggatccggaatatgcttggcataaaaacttcttcttgatggcaggcattaacgtgacatgcctggctttctaccttctgtttgcaaaaggagatattcaggactgggctaaagaaacaaaaaccacacggctgtgaagttagtagaagagtgagcacctgagaaacatgaggtcagcatccatattgaaaggaagaggattctgtgtgggactgcagtcatgggagtcatgaacacctgaagaccggtagcctgaagcttttaagggagtcattgcctcccactttagtctgagtgattcttttgcactgtgtattgtgtgtaacaagttatacttctgactttaaagaggaatctgtctgtcttcctatgatccaataaacaaacgtattcggg

SEQ ID NO: 4115 - DNA, 4224 bp, Rattus norvegicus
  Genbank Accession No. U29339
agttgcagtttgcaacctccgctgcggccgcagctacctattcgctggctgttcaggtggctttcgcttcgatgtcctcctaatcttggggcccccgggccagactcgggagggctcccttcaccatccgctggaatcatgagggcgactgggactctgcaggtgctgtgcttccttctcagcctggcccggggttccgagatgggcaactctcaggcagtgtgtcctgggactctgaacggactgagtgtgaccggagatgcagacaaccagtaccagacgctgtacaaactgtatgaaaagtgtgaggtggtcatgggtaacctggagattgtgctcacaggacacaatgctgacctttccttcctgcaatggatccgagaagtgacaggctacgtcctcgtggccatgaatgaattctctgtgcttcccttgcctaacctccgagtggtccggggaacccaggtctacgatgggaagttcgccatctttgttatgttgaactacaacaccaactccagccatgctctgcgccagctcaagttcactcagctaacagagattctgtcagggggcgtttacattgaaaagaatgacaaactttgccacatggatacaattgactggagagacatcgtgagggttcgaggcgctgagatagtggtgaagaacaatggtgcgaactgtccaccctgtcatgaggtctgcaagggacggtgctggggtcctggaccggacgactgccagatattgaccaagacgatctgtgcccctcagtgtaacggtcgctgcttcgggcccaaccctaaccagtgctgtcacgatgagtgtgctgggggctgctctggacctcaggacacagattgctttgcctgccgacgcttcaatgacagtggggcctgtgtgccccggtgtccagagcctcttgtgtacaacaagctaacgtttcagcttgaacccaacccccataccaagtatcagtatggaggagtctgcgttgccagttgtccccataactttgtggtggaccagacgttttgtgtcagggcttgtcctcctgacaagatggaagtagataagcacggactgaagatgtgtgagccttgcggagggctgtgccccaaagcctgtgaggggacaggctctggaagccgctaccagactgtggactcaagcaacattgatgggttcgtgaactgtaccaagatcctgggcaatctggacttcctcatcaccggcctcaacgttgacccctggcataagatacccgcactggacccggaaaagctcaatgttttcagaacagtccgggagatcacaggttacctaaacatccagtcctggccccctcacatgcacaacttcagtgttttttccaatctgacaaccatcgggggcagaagcctctacaaccggggcttctccttgttgatcatgaagaacttgaatgtcacatccctgggtttccggtccctgaaggaaatcagtgctgggcgtgtctacataagtgccaatcagcagctttgctaccaccactctctgaactggaccagactgcttcgggggccctcggaagagagacttgacatcaagtacgaccggcctctgggagaatgcttggcagagggcaaagtgtgtgatccactgtgttcctctgggggatgctggggcccaggccctggtcagtgcttgtcttgtcgaaactacagccgggaaggtgtctgtgtgactcactgcaacttcctgcaaggggaaccccgggagtttgttcatgaggctcaatgcttctcctgccatccagaatgcctacccatggagggcaccagcacatgcaatggctcgggctctgacgcttgtgcacgatgtgctcattttcgtgacgggccccactgtgtgaacagctgcccccatggaatcctaggtgccaaaggtccaatctacaagtatccagatgctcagaatgagtgtcggccctgccacgagaactgcacccaagggtgtaatggaccagaactacaagactgtttaggccaagcagaggtgttgatgagcaaacctcatctggtaatagcggtgacggtgggactggccgtgatcctcatgattctgggaggctcttttctgtattggcgtggacgcaggattcagaacaaaagggctatgagacgctacttggagcggggtgagagcatcgagcctctggacccaagcgagaaggcaaacaaagtcttggctagaatcttcaaagagacagagctgaggaaacttaaagtgcttggctctggcgtctttggaactgtccacaaggggatttggattcctgagggtgaatccatcaagattccagtctgcattaaagtcatcgaggacaagagtgggcgccaaagttttcaagctgtgactgaccatatgctggccgttggcagcctggaccatgcccacattgtacggctgctaggactgtgcccagggtcatctctgcagcttgttactcagtacttgcccctgggctccctccttgatcatgtgaaacagcaccgtgagacattgggaccacagctgctgctcaactggggagtacaaattgccaagggcatgtattacctcgaggaacatagcatggtgcacagggaccttgcgctccggaacgtgatgctcaagtcaccaagtcaggtccaggtggcagattttggtgtggctgacttgctgccaccagatgacaagcagttgctacatagtgaggccaagactccaattaagtggatggcccttgagagtatccactttgggaaatacacacaccagagtgatgtctggagttatggtgtaacagtttgggagttgatgaccttcggggcagagccctatgcagggttacgactggctgaaataccagacctgctagagaagggagagcggttagcacagccccagatctgcaccattgacgtctacatggtcatggtcaagtgctggatgattgatgagaatattcgcccaacctttaaagaactagccaatgagtttaccaggatggcccgtgacccaccaaggtatctggtcatcaagagagcgagtgggcctggaacacctcctgcggcagaaccctctgttctgaccaccaaagagttgcaggaggcagagctggagccagaactggacctagacctagacttggaggcagaggaggagggcctggccacctccctgggttctgctctcagcttgcctacgggaacgctcacccggccacgtgggagccagagccttttaagtccctcatctgggtacatgcccatgaaccagagcagtctcggagaggcttgtctggattctgcggttttggggggtcgtgaacagttctcccgtcccatctctctgcacccaattccacgggggcgtccagcatcagagtcatcagagggccacgtgacaggctctgaggctgaactccaagagaaagtgtcagtgtgtaggagccgaagccggagtcggagcccgcggcctcgtggggacagtgcctaccattcgcagcgacacagcctgcttactcctgtgaccccgctctccccaccagggttagaggaggaggacggcaatggctacgtcatgccagatacacacctcagaggtgcgtcctcctcccgggaaggcaccctctcgtcggtaggtctcagttctgtgttgggtactgaggaggaagatgaagatgaggagtatgaatacatgaaccggaagagaaggggtagccctcctcggccccccaggcctggctccctggaagaactgggttacgagtacatggatgtgggttcagacctcagtgcttctctgggcagtacacagagctgcccgctccatcccatggccatcgtgccctctgctggcacaactccagatgaagactatgagtacatgaaccggaggcgtggtgcgggtggcgccggaggggactatgcagctatgggggcctgcccagcagctgagcaagggtacgaggagatgcgagctttccaggggcctggacatcacgccccccatgttcgttatgcccgcctcaaaactctgcgtagtttagaagccaccgactctgccttcgacaaccccgattactggcacagcaggcttttccccaaggctaatgcccagagaacgtaaacttctgctccgtgacgctctgcgggcgtgtggcggcagctagtgcctcttcgagggtacccaatg

SEQ ID NO: 4116 - DNA, 573 bp, Rattus norvegicus
  Genbank Accession No. U31598
gtgcttgaagcttctccccaggcgtggtgggatgagtcgcagaaccacacattccgtcacactctgttctgccaggatgggtttcccaacatagggctctccgagacctacgacgaggacgcactcttctccttcgacttctcccagaacaccagagtgccccggctgcctgagtttgctgagtgggctcaggaacagggagatgcctctgccattgcgtttgacaaaggcttctgcgacatgttgatgcagaatgtgagcccgcggcttgaaggtcaaatcccagtgtccagaggtttgccttcggctgaggtgttcaccctgaagcccctggagtttggcaagcccaacacgctggtctgtttcatcagcaacctctttccaccgactttgacggtgacctggcagcatcatttcgtccccgtggagggagccagccccacatccgtttcagccatcgatgggctcaccttccaggccttctcttatttaaacttcacaccggaacccttcgacctttactcctgcactgtgacgcacgagattgaccgctacacggcgattgcctattgg

SEQ ID NO: 4117 - DNA, 2657 bp, Rattus norvegicus
  Genbank Accession No. U31866
gttttttttttttttttttttttttttttttttttttatgaagaataagcgatccgtttgggatttattgcatttaaagacggcagattattaaaacagtaggtatgataaatacagtaagaaaataactttaaatctcaaacaaaacagtgaacagaattcaagactaagcaatgtaaaggcaataaggtaacaaaattagtgctttactgggtacagggaaagtaactgaagtctatctcaaactcttcccggctacatttgagggcttaagttactttagcaagtatgtctttataacaattagaaatataactaaggatataaacccagtttatttaaaaattaaagttatttgcttagtggtacataaaaggcttcagaaaattcaagtttaacaaaaaaaaaaaaaaaaggaagtgtaatcaaagaaagtgcacttaaagccgtttgccagcaattaaagggctcttccaggctggaggtgtggctcagccctaaagcgcttgcccagcatgtgcaaggccctgggttcagttcccagcaccgcaaaagaaagaacaagtggcaattactccttctagtataggatgatctctcagtcacaaaagaacatagtaataaaatcagtcttcctgtaggcactgtgaacctttaattaaaaaaaaataacctaaaccagacccagccctctgaattttcatctacttcttccttttagtggcttttgtaaacttcgtaactaggagtgaatgctcttaagagaaacgattgcctttttaaattcacattaattccgtagtggagagcctcgatgtgcctgtgtctttttatcttagtagagaacaccaccgagtgtaaatttttccaacagtcatctgttgttctctcagtagactcagtagactgtcaactcagtaactgaatgtaaattgatgactagttttgcttagaaataaaagaaaaagaatgacagagttcactgcgcattctacatgtattaaacagataatacctaactccccacaggtagtgacattaatacatgtgcgccttctgacagtgctttagtgaagtgcccaaatctggataacccaagggaggcacacccaagactggctccaccttcgtattttccgtcagaagaggagagtagtcagtccctgttaaacagggtaggactgatcgcaaggtgcgcagatccgagagccacgtgacttcataaatgcccagggtacacagctcaggggaggggcactcagtttaaatctggtcggttccattctcacccaacttggagtagtcctttctccaactacataccgagaacgtctgtgccttagtagataactttcttaagtgccctgaaagatcctctggtaatactagcgttttgctgacgtgatcaaagtaaagcaagtagtccactttttaagaaaagattccaagttaatgagcacagttaaagcttctaggtgacacctttggcctcagactttcgagctgggttcctaacgtgacttcccttcgatgttcaagtctaacaggtttagttagaactgctttgcacactgggaagcacaaggcacacccaaatgacattctttaaaccagaactgggccgtcccataacagagccagcctttcagtgagtgctgggtgctgggtgctgggtgctgggtgctaagtgctctcttgagcaagagaaatgtaacgcaaaggagccgccccttggacctccagtgaaacagtctgtccaatgagatgatctcgagaggcgcgtcaccgctgggctgttggaggcaatgtaaacattttaggctgtggcacagctgtttcctaaggatttgtccagcattagccggaggggctgcgagtgatcacttctaagtattcagtgcagtgaaaggcgagtggaactctgacttcatagtcacaactcattactttaggaggaaagcatttctgttcggtagcgtagagggcctactgccatttgcattagtgagaataatcaacctgagaaccagacagaaaggtgcaaacacagctctcctttggcacaaggacattaagtggtgaaggcatcagactccagcatcaactggaacaacctgaaaggcaagaagtcctgccatactggagtagacagaaccgccggctggaacatccctatgggcctgctgttcagcaggatcaaccactgcaagttcggtgagcagagccgggaagggagattgggaggggccatgcagaaaaaaaggggccctaagaagggccataggtttggggtccataaaagtgaagcccctcaaaaatgaacctcaaggaaatagggaagaggactaggaggaaccaggggctaaggaatggagtcaggacggttgtctttattgcaaataatggcattagtggctatacattcgcttgtctctctcatgatggagatcagaggtgagcattctgtggctgataaggtcttgagggctccttccttctttctggaccatcatttccatcatagtacttccacattcaaaaagcaaccttgctgaggcagtcacaattcaggcaagaacgagagcaagtggaaatgtacaccaaccgtggtcagtgtttgaaaagagccttctgctgggttcggtccccagctctga

SEQ ID NO: 4118 - DNA, 3945 bp, Rattus norvegicus
  Genbank Accession No. U32314
cgcggcggccacggcttgaggcgacggggcgaagatgctgaagttccaaacagttcgagggggcctgaggctcctgggtgtccgccgatcctccacagcccccgttgcctccccaaatgtccggcgtctggagtacaagcccatcaagaaagtaatggtggccaacagaggtgagattgccatccgagtgtttcgtgcctgcacagagctgggtatccgcacagtggctgtctactcggagcaggacacaggccagatgcaccggcagaaagctgatgaagcctaccttattggccgtgggctggctcctgtgcaagcctacctgcacattccagacatcattaaggtggccaaggagaatggtgtagatgctgtgcaccctggctatgggttcctctcagagagagcagactttgcccaggcctgccaagatgctggagtccgattcattggtccaagcccagaggtggtccgcaagatgggagacaaggtggaagcccgggccattgccattgctgcaggcgttccagtggtccctggcactaattcccccatcaattccctgcatgaggcacacgagttctctaacacctatggtttccctattatcttcaaggctgcctatggaggtgggggccgtggcatgagggttgtgcatagctacgaggagctggaagagaattacacccgggcctaccctgaggccttggcagcctttgggaatggggcattgtttgtggagaaattcattgagaagccaagacacattgaggtgcagatcctaggggaccaatatgggaacatcttgcacttgtatgagcgggactgctccatccagcggcggcaccagaaggtggtagagattgcccctgctacccacctggacccccaacttcggtcacgcctcaccagtgactctgtcaaacttgccaagcaggttggctatgagaatgcaggcactgtggagttcctggtggacaagcatggcaagcactacttcatcgaggtcaattcccgcctgcaggtggagcacacggtcactgaggagattacagatgtggacctggtccatgctcagatccatgtgtccgaaggccggagcctgcctgacctaggcctgcggcaggaaaacatccgaatcaatggttgtgccattcagtgtcgggtcaccactgaggaccctgcacgcagcttccagccagacactggccgcattgaggttttccggagtggtgagggcatgggcatccgcctggacaatgcctcagcattccagggagctgtcatatccccccactatgactccctgctcgtcaaagtcattgcccatggcaaagaccaccctacagctgccaccaagatgagcagagccctggcggagttccgtgtccgaggtgtaaagaccaacatccccttcctgcagaatgtgctcaacaaccagcagttcctagcgggcattgtggacacccagttcatcgatgagaaccccgagctgttccagctgcggcctgcacagaaccgggcccagaagttgctacattaccttggacacgtcatggtcaatggccctaccactccaatccccgtcaaggtcagtcccagccctgtggaccccattgttcctgtggtgcccataggcccacccccagctggtttcagagacatccttctgcgagaggggccagagggctttgccagagctgtgcggaatcaccaggggctgctgctaatggacacaaccttccgggatgcccaccagtcactacttgccactagagtgcgcacacacgatctcaaaaagattgcaccctacgttgcccacaacttcaacaacctcttcagcatagagaactggggaggagccacatttgacgtggccatgcgcttcttgtatgagtgcccctggcggcggctccaggagctccgggagctcatccccaacatcccattccagatgctactgaggggggccaatgctgtgggctacaccaactaccctgacaacgtggtcttcaagttctgtgaggtggccaaagagaatggcatggacgtcttccggatctttgactcccttaactacctgccaaacatgctgctgggcatggaagcagctggcagtgctgggggtgtggtggaagctgccatctcctacacgggtgacgtggctgaccccagtcgcactaaatactcactggagtactacatgggcttagctgaagaactggtgcgagccggcactcacatcctctgcattaaggacatggcaggcctgctgaagcctgcagcatgcaccatgctggtcagctccctccgggaccggttccccgacctcccactgcacatccatacccatgacacatcagggtcaggtgtggcagccatgttggcctgtgcacaagctggggctgatgttgtggatgtggcagtcgactctatgtctgggatgacctcacagcccagcatgggggccctggtggcctgtaccaaagggactcctctggacacagaggtacccctggagcgtgtgtttgactacagtgagtattgggaaggggctcgggggctgtatgcagcctttgattgcacggctaccatgaagtctggcaactcagacgtgtatgagaatgaggatccagggggccagtacaccaacctacacttccaggcccacagcatgggacttggctccaagttcaaggaggtcaagaaggcctatgtggaggctaaccagatgctgggggacctcatcaaggtgacaccatcctccaagattgtgggggatctggcccagttcatggtgcagaacgggttgagccgggcagaggcagaagctcaggcagaagagctgtccttcccccgctctgtggtggagttcctgcagggctacattggcattccccatgggggtttccctgaacccttccgttctaaggtgctaaaggacctgccaaggatagaaggagggcctggagcctccctccctcccttgaacctgaaggagctggagaaggacctgattgataggcatggagaggaggtgaccccagaggacgttctctctgcagccatgtaccctgatgtctttgctcagttcaaagacttcacggctacctttggccccctggatagcctgaatactcgtctctttcttcaaggacccaaaattgcagaggagtttgaggttgagctggaacggggcaagaccttgcacatcaaagccctggctgtaagcgacctgaaccgtgctggccagaggcaggtgttctttgaactcaatgggcagcttcgatccattctggttaaagacacccaggccatgaaggagatgcacttccatcccaaggccttgaaggatgtgaagggccaaattggggcccctatgcctgggaaggtcatagacgtcaaggtggcagcaggagccaaggtggttaagggccagcccctctgtgtgctcagcgccatgaagatggagactgtggtgacttcgcccatggagggcactatccgaaaggttcacgtgaccaaggacatgactctggaaggcgatgacctcatcctagagattgagtgatcttactccagactggcagcctggccaaccctaccccaagcctctcaacagaagctgtgcagccagggcaggcccaggcagtacctgagggctaggccttgaggtcctgtcccatgggacagcacacacactacctgcaatggccctcccattcccttcagctatttgtccttgtcttgctggcaggcagttctcacatattcatctcttgccaaataagggtctgctcctcgtgggagaccacaggtgtacagtaggtggccttgtacctgggagaggggttctacctctgggggtagagggaagaagacctaattcataggtcctgggaaatttgctcaataaaagtggccttcccttgccctccacaaaaa

SEQ ID NO: 4119 - DNA, 2265 bp, Rattus norvegicus
  Genbank Accession No. U32575
atgtgcaaagattctgcctgcttttcgactatgaaggagacagacctggaggctgttgcaacagcagtccaaagggtggctgggatgcttcagcgcccagaccagctggacaaagtggagcagtatcgcagaagggaggctcggaagaaggcctctgtggaggccaggctaaaggccgcaatccagtctcaactagatggcgtccgcacaggcctaagccaactgcacaatgcactgaatgatgtcaaggatatccagcagtcactggctgatgtgagcaaggactggaggcagagcatcaacaccatcgagagtctcaaggacgtaaaagacgcagtggtgcagcacagccagctggctgcagctgtggagaacctcaagaacatattctctgtgcctgagattgtgagggagacccaagatctcatcgagcaaggggctctcctgcaggcccaccggaagctaatggatctggagtgctcccgggatgggctaatgtgtgagcagtaccgcatggacagtgggaacaaacgggacatgaccctcattcatggctacttcggtagcacacaggggctctctgacgagctggccaagcagctgtggatggtgctgcaaagatcgctggtcactgtccgccgggatcccaccttgctggtctccgtggtcaggatcattgaaagggaagaaaaaattgacaggcggatacttgatcgaaaaaagcaaactgggtttgttcctcctggaaggcccaaaaactggaaggaaaaaatgtttgccgtcttggacagaactgtgacgactagaatcgaaggcacgcaggcggacaccagagaatctgacaagatgtggctcgtgcgccacctggagatcattaggaagtacgtcctggatgacctcgtcatcgccaagaacctgctggtgcagtgcttccctcctcactatgacatctttaagaacctcctgagcatgtaccaccaggccttgagcattcggatgcaggacctcgcctcagaggaccttgaggccaacgagattgtgagcctcttgacctgggtcctaaatacctacaccagtgcagagatgatggggaatgtggagctggccccagaggtggacgttaatgccctggaaccgctcctctcaccaaacgtggtctctgagctgctcgacacatacatgtcaacactcacgtccaacatcattgcctggcttcggaaagcactggagacagacaagaaagactggagcaaagagacggagccggaagcagaccaggacggctattatcagacgacacttcctgccattgtattccagatgtttgaacagaatcttcaagttgctgctcaaataagtgaagatttgaaaacaaaggtattagttttgtgtcttcagcaaatgaattctttcctaagtagatacaaagaggaagcccagctttacaaagaggagcacctgagaaaccggcagcacccacactgttacgtgcagtacatggtcgccatcatcaataactgccagaccttcaaagaatccatcatcagtctgaaaagaaaatacctaaaacccgaaacagaggaaagcctgtgtcagagtcagcccagcatggatgggattctagatgccattgctaaggaaggctgcagcagtctgctagaggaggtcttcctggatctagagcaacatctgaatgagctaatgacaaagaagtggatgttaggatcaaatgctgtggacatcatctgtgtcaccgtagaagactacttcaatgacttcgccaaaattaaaaagccatacaaaaagaggatgacagctgaggcacacaggcgtgtggtggtggaatacctgcgggctgtcatgcagaagcgtatttcctttcggagtgctgaagagcgcaaggagggtgctgagaagatggtcagagaggcggaacagctccgcttcctgttccggaagctggcatctggatttggtgaggatgcagatggacactgtgacacaatcgttgcagtggcagaggtcattaagctcacggacccgtctctgctctacctagaagtctcaactctggtcagcaaatatccagacatcagagatgaccatattggtgcgctgctggcactgcgaggagacgccagccgggacatgaagcagaccatcatggagacactggagcagggccccatgcaagcgagccccaactatgtgcccatcttccaggagattgtggtgcccagtctgaacgtggcaaagctccttaag

SEQ ID NO: 4120 - DNA, 4344 bp, Rattus norvegicus
  Genbank Accession No. U32681
ggaacagattctggtttggctgtgaggctggtgaatggaggagacaggtgtcggggtcgcgtggagatcctttaccagggttcctggggcaccatgtgtgatgacagctgggacatcaatgatgccaacgtggtgtgcaggcagctgggctgtggctgggccttgtctgccccaggaagtgcccagtttggacagggtctgggtcccattgttctggatgacgtggcctgtagaggacatgaggcctatctgtggagctgctcccaccgaggctggctctctcataactgtggacatcaggaggatgctggagtgatctgctcagattctcaaacaagcagtcccacacccggttggtggaaccccgggggcacaaataacgatgtgatctacgacactcaagaaaccacagaaacttctcaaacaagcagtcccacacctgattggtggaaccatgggggcacaattaatgatgtgatctatgacactcaagaaaccacagaaggaacagattctggtttggctgtgaggctggtgaatggaggagacaggtgtcggggtcgtgtggagatcctttaccagggttcctggggcaccgtgtgtgacgacagctgggacatcaatgatgccaacgtggtgtgcaggcagctgggctgtggctgggccttgtctgccccaggaagtgcccagtttggacagggctctgggtccattgttctggatgacgtggcctgtagaggacatgaggcctatctgtggagctgctcccaccgaggctggctctctcataactgtggacatcaggaggatgctggagtcatctgttcatattctcaaacaagcagtcccacacccgattctcaaacaagcagtcccacacccggttggtggaaccccgggggcacaaataacgatgtgtcctatggacccgaacagaccacagacgcaacagattctggtttggctgtgaggctggtgaatggaggagacaggtgtcagggtcgtgtggagatcctttaccagggttcctggggtaccgtgtgtgacgacagctgggacaccaaggatgccaacgtggtgtgcaggcagctggtctgtggctgggccttgtctgccccaggaagtgcccactttggacaaggctctggatccattgttctggatgacgtggcctgtacaggacatgaggcctatctgtggagctgctcccaccgaggctggctctctcataactgtggccaccatgaggatgctggagtcatctgttcagatgcccaaacccagagcacaacctggccagatatgtggcctactaccactccagaaactacaacagattggtggactacaaaatattcttcctctgttcctacaacacaattccccaccatagccgattggtggacaactccttctccggaatacacctgtggaggtttactgaccctaccctatgggcagttttccagcccatactaccctggaagctatcctaacaatgccagatgtttgtggaaaattttcgtctccagcatgaaccgtgtgacagtggtcttcacagatgtgcagcttgaaggaggttgcaactatgactacatcctggtttttgatggccctgaaaacaattcttctctcattgctcgggtttgtgatgggttcaatggatctttcacctcaacccagaacttcatgtctgtagtctttatcacggatggcagtgtcacgaggagagggttccaagctgactactactccactcctatcagcaccagcacaacctctccaacgacgttcccgatcgttactgattggtggacaactccttctccggaatacacctgtggaggtttactgaccctaccctatgggcagttttccagcccatactaccctggaagctatcctaacaatgccagatgtttgtggaaaattttcgtccccagcatgaaccgtgtgacagtggtcttcacagatgtgcagcttgaaggaggttgcaactatgactacatcctgggttttgatggtcctgaatacaattcttctctcattgctcgggtttgtgatgggtccaatggatctttcacctcaacccagaacttcatgtctgtagtctttatcacggatggcagtgtcacgaggagagggttccaagctgactactactccactcctatcaggaccagcacaactcctccaacgacgttcccgatcattactggaaatgattcttcattggtgctgaggctggtaaatggaacaaaccggtgtgagggccgagtggagatcttgtacagaggctcttgggtaccgtgtgccgacgacagctgggacatcaatgatgccaatgtggtctgcagacagctcggttgtggctctgctctgtctgctccaggaaatgcttggtttggtcagggttcagggctcattgtcctggatgatgtgtcttgctctgggtatgagtcccacctgtggaattgtcgtcaccctggctggcttgttcataattgtcgtcatgttgaggatgcaggagtcatttgctcactccctgatccgactccctctcctggtccagtttggacaagtcctccttttgtaaactatacttgtggaggtttcctgactggactctctgggcaattttctagcccatactaccctgggagctatcctaataatgccagatgtttgtggaacattgaagtcccaaacaactaccgcgtgactgtggtcttcagagatgtgcagctggaagggggctgcaactatgactatatagagatttttgatggcccccaccacagttcacctctcattgcccgggtttgtgatggggccatgggctctttcacttcaacatccaacttcatgtcagttcgcttcaccactgatcacagtgttactcgaagagggttccgggctgactactactcagactttgacaataataccaccaatctcctttgtctgtcaaatcacatgagagccagtgtgagcaggagctaccttcagtccatgggctactcctccagggatcttgtcattcctggttggaacgtgagttaccagtgtcagcctcagataacacaaagggaggtcatattcacaattccctacacaggctgcggtactaccaaacaggctgacaacgagaccatcaactactccaacttcctcaaagcggctgtttcaaatggcatcatcaaaaggagaaaggatctccacatccatgtcagctgcaagatgcttcagaacacctgggtcaacaccatgtacatcaccaacaacacagtcgagatccaggaagtccagtatggcaattttgacgtgaatatttccttttatacatcctcctccttcttgtatccagtgaccagcagcccatattatgtggatctggaccagaatttgtaccttcaggccgaagtcctccattcggatacctctttggctctgtttgtggacacctgtgtggcttcgccacatcccaatgacttctcgtctttgacatatgatctcatcaggagtggatgcatacgagatgaaacttaccaatcttactcctcgccctcaccacgcatcacccgctttaaattcagttctttccacttcctgaaccgcttcccctcagtatacctacagtgtaaactggtggtttgtcgagcaaacgatgtctcctcacggtgctacagaggatgtgtagtaaggtccaagagggatgtaggctcctaccaagaaaaggtggatgttgttctgggacccatccagttgcaatctcccagcaaagaaaagaggagtctcgacttggcagtggcagatgtggagaagccagccagctcccaggaggtctatcccactgcagccatctttggtggagtcttcctggccctggttgtagctgtggcagccttcacactgggaaggaagacacgcactgcccgtggtcaacctccaagtactaagatgtgaagcaaaacaacccagacattggtcccaaatgcatagattcccagaaaagatggaagtcaggagtgtctaatgcctggcacccagatacacgatgactaggcttcccttagcacaaatgtgtggccgagtatgatcagatggtaaagaagaaaggtgggggccaagttttcccagggtctagaggctgaaggctgggaagaatgtcataggagaatgagatcagtgtctacaataacaggcaactgtgagccaaacattggcatcaccatcctttctctagctagaatttccctttcccccttttatactgacttttttgaactgtagtgttaaatggacctttccgtacaacaaactaaaataaagaatctttttcca

SEQ ID NO: 4121 - DNA, 1998 bp, Rattus norvegicus
  Genbank Accession No. U33500
ggtgctgctgctgcatgtctgactgagaagggagccgagcatctgaggagcaagacatcagaaggctggagtcccttccctgactaggccagagctaaaaggacaaggctcagggctagcctctgcctatctagttcttttctccctgaagcttacaccatcctgtgggagccgatgcccgtctcattttgactcagagtctgtccctctgcttgtcttctacaaaccatgtggctgtacctgctggcactggtgggcctgtggaacctcctgcgcttgttcagggagaggaaggtggtaagccatctccaagacaaatatgtcttcatcacgggctgtgactcaggctttgggaacctgctggccagacagctggacaggagaggcatgagggtgctggctgcatgtctgactgagaagggagccgagcagctgaggagcaagacatcggacaggctggagacagtgatccttgatgtcaccaagacagagagtattgtggcagccactcagtgggtgaaggagcgagttgggaacacaggactctggggcctggtcaacaatgctggcatctccggccacctgggtcccaatgagtggatgaacaaacagaacattgcaagtgtgctggatgtgaacctgttgggcatgatcgaggtgactctgagcacggtgcccttagtgaggaaggcgaggggccgtgtggtcaacgttgccagcatcgcaggccgactgtctttttgtggtggtggttactgcatctccaagtatggtgtagaggccttctcagactccctcaggagagagctctcctattttggggtcaaggtggctattgtagagcctggcttcttcaggactgatgtgaccaatggtgtcacattatcatcaaacttccagatgctgtgggaccagaccagctcagaagtcagggaagtctatggcgagaactacctggcatcttatctgaaaatgctaaatggattggaccagaggtgcaacaaagatctgtctctggtgactgactgcatggagcacgccctgacttcctgtcaccctcgcacccggtactcagctggttgggatgccaagttcttctacctccccatgagctatctgcccacctttcttgtggatgcccttttctactggacttctccaaagcctgagaaagctctctgaagtctttacctatgtacataactgaggagatgttggtacagtgttagggaggggatcctgaggaggaggtcggagtgctgaggagggagggaggtcattcctctggggtttagtccacactcttcattttgctaattttcctgtgctactactcaaggctgactcgactgacccaagaaatagccaaagaattctgcgaagaagttcaaatacaaaagtgctggcagttgcctagcctctgggcaccatgacctaccatggcgatccacacaaatggggagtttgagaccagcttgtaccaaacactgccctgggtccccctgtgcaggaagtgcacatgccctggctagtttgtaccctatgcagcatagaagtgtccctgctctgaagtcacctgtgaccctggtgtcaggtttgagaagaatcactaataattctaacactcatgcttgaaggccaggtcgcagcctgggtgggagagtcggttacttgtggtgagaatatagtagaggatagagacattaattttttttaaatttactttgaagtcatggctcttcttttcttttttggagtcttttcctttttagagcatagcatgaggtgacctcttgttccctgtgatttaaacaatggcattgctggttggtgaggtttggattgcaggggtaaggggaatgtcctgagaagggtgtgcataggccagcaggaatttccttgcccgtctcagcccttctagccactgaggtgggaataactgctgtccattcaaaacttaacaacaacccctaaggcataagagcatgcatgcaggcc

SEQ ID NO: 4122 - DNA, 632 bp, Rattus norvegicus
  Genbank Accession No. U33540
gtggacaagtgcaccccagaaatcaaaaggcatttctcttcaattcccttctgtcctgtgtctctggctcatggtgtccttgccaacatctagagtggaggtaatggaatagcaaatgagcaggtcacagcagcccaagcaggaagtgttatgttcacactttttgacaatgacagacaggaggtaggaacagctagagttgcataaccttagggagaggtgggttcagcatcaaaagtcttgctggagtgtgcagtgaagcataatataattagaccaggaccatgaaacctaatgtcctgctcctccttgctatcctcctcagcttcttgctattcctggtcagaggccatgcaaaggtccatggtcatcttccaccaggaccccgtcccctacccatcttgggaaacctcttgcagatggacagaggaggcctccttcagtctttcacgtaggtgagacctagaaggggccttagtgtgggcttccactggttttgtctttggagctaactcagtggaaatagaaagagactccttccagggtataggtttaggtgggaagattgctgagggtagggtgagatgctgactggtgatgtgtgctcatttgtgttcaagtcgacacacacc

SEQ ID NO: 4123 - DNA, 3077 bp, Rattus norvegicus
  Genbank Accession No. U37142
ggcacgaggcgggacgcggtgtgtggaggggacctcacaagttcttccaagtttgcagcatgatcccattgcttctgtccctgctggcagctctggtcctgacccaagcccctgcagccctcgctgatgacctgaaagaagacagctcagaggatcgagcctttcgggtgcgcatcggtgccgcgcagctgcggggtgtgctgggcggtgccctggccatcccatgccacgtccaccacctgaggccgccgcccagccgccgggccgcgccgggctttccccgagtcaaatggaccttcctgtccggggaccgggaggtggaggtgctggtggcgcgcgggctgcgcgtcaaggtaaacgaagcctatcggttccgcgtggcgctgcctgcctaccccgcatcgctcacagatgtgtctttagtattgagcgaactgcggcccaatgattccggggtctatcgctgcgaggtccagcacggtatcgacgacagcagtgatgctgtggaagtcaaggtcaaaggggtcgtcttcctctaccgagagggctctgcccgctatgctttctccttcgctggagcccaggaagcctgtgctcgcatcggagcccgaattgccacccctgagcagctgtatgctgcctacctcggcggctatgaacagtgtgatgctggctggctgtccgaccaaaccgtgaggtaccccatccagaacccacgagaagcctgttatggagacatggatggctaccctggagtgcggaattacggagtggtgggtcctgatgatctctacgatgtctactgttatgccgaagacctaaatggagaactgttcctaggtgcccctcccggcaagctgacgtgggaggaggctcgggactactgtctggaacgcggtgctcagatcgctagcacgggccagctatacgcggcatggaatggcggcttggacagatgtagccctggctggctggctgatggcagtgtgcggtaccccatcatcacgcccagccaacgctgtgggggaggcctgccaggagtcaagaccctcttcctctttcccaaccagactggcttccccagcaagcagaaccgcttcaatgtctactgcttccgagactctgcccatccctctgccttctctgaggcctccagcccagcctctgatggactagaggccattgtcacagtgacagagaagctggaggaactgcagttgcctcaggaagctgtggagagcgagtctcgtggggcgatctactccatccccatcacagaagatgggggaggaggaagctctaccccagaagacccagcagaggcccccaggactcctctagaatcagaaacccaatccgttgcaccacctaccgggtcctcagaagaggaaggcgaagccctggaggaagaagaaagattcaaagacacagagactccgaaggaagagaaggagcaggagaacctgtgggtgtggcccacggagctcagcagccctctccctactggcttggaaacagagcactcactctcccaggtgtccccaccagcccaggcagttctacagctgggtgcatcaccttctcccaggcctccaagggtccatggaccgcctgcagagactttgcaacccccaagggagggaagcctcacatctactccagatggggcaagagaagtagcgggggaaactgggagccctgagctctctggggttcctcgagaaagcgaggaggcaggaagctccagcttggaggatggcccttccctccttccagcgacatgggcccctgtgggtaccagggagctggagaccccctcagaagagaagtctggaagaactgttctgacaggcacatcagtgcaggcccagccagtgctgcccaccgacagtgccagccgaggtggagtggctgtggctccctcatcaggtgactgtatccccagcccctgccacaatggtgggacatgcttggaggagaaggagggtttccgctgcctctgtttgccaggctatgggggggacctgtgcgatgttggcctccacttctgcagcccgggctgggaggccttccagggtgcctgctacaagcacttttccacacgaaggagttgggaggaggcagaaagccagtgccgagcgctaggggctcatctgaccagcatctgcacccctgaggagcaggactttgtcaacgatcgatacagggagtaccagtggattgggctcaatgacaggaccatcgagggtgacttcctgtggtcagatggtgcccctctgctctatgaaaactggaaccctgggcagcctgacagctacttcctgtctggggagaactgtgtggtcatggtgtggcatgaccagggacagtggagtgatgtaccctgcaactaccacctatcctacacctgcaagatggggcttgtgtcatgtggacctccaccacagctgcccctggctcaaatatttggtcgccctcggctggcctacgcggtggacactgtgcttcgatatcggtgccgagacgggctggcccagcgcaacttgccgttgatccgctgccaggagaatgggctttgggaggcccctcagatttcttgcgtgccccgaagacctgcccgtgctctccgctcaatgaccgccccagaaggaccacggggacagctcccgaggcagaggaaagcactgttgacacctccctccagtctctagggaacaggcgtggaagactactgcccccaccagggccctctcacttcaactgcctgtgctcttccctatgatagggggttgacaagagaggggtgggactggaattcagaggacaagcgacccgaaggggtttctgggaaacacttgggtgactccgcccaacctagaccccgccccctcatacaagggcctcaggttttacccggtaagtccctaagtgcctcaactgccttctgctgtcagctgcctccttgtttctcgatttctttaggggacactgtgctactcgttcttaattttcaaagggtttttaggatggagtaccagcaaaaccaggtggaaataaagttgtttgaacctcgtgcc

SEQ ID NO: 4124 - DNA, 1470 bp, Rattus norvegicus
  Genbank Accession No. U38253
gcggctacggcgtgcggggagctgaggtaaagccggggctagtacggtaccaggcggtgcacgagctggctaagccagatttgtaaaaatggagtttcaagccgtagttatggccgtcggtgggggatctcggatgacagacttgacttccagcattcccaagcctctgcttccagttggaaacaaacctttaatttggtacccgctgaacctgcttgagcgagttggatttgaagaagtcatcgtggttacaaccaaagatgtccaaaaggctctgtgtgcagagttcaagatgaaattgaagccagatattgtgtgcattcctgatgaggcagacatggggactgcagattctctacgccacatatatccaaaacttaagactgatgtgctggtcctgggctgcgatctgataacagatgttgccttacacgaggttgtggacctgttcagagcttacgatgcatcacttgccatgttaatgaggaaaggacaagagagcacagaaccagttccaggtcagaaggggaaaaaaaaaacagtggagcagcgtgacttcattggagtggacagcacaggaaaaaggctgctctttatggctaatgaagcagacttggatgaagagctggtcattaagggatccatcctgcagaagcaccctaggatacatttccagacaggccttgtggatgctcatctctactgcttgaagaaatatgttgtggatttcttaatggaaaataagtcaatcacttctatccgaagcgaactgattccgtacctagtaagaaaacagttttcctcagcctcctcacagcaaaggcaggaagacaaagaagaggatctaaagaaaaaggagcccaagtctttagatatttacagttttataaaaaaagacaacactctgactttggctccctatgatgcctgctggaatgcttttcgaagagacaagtgggaagatttgtctagatcacaggttcgctgctatgtccacatcatgaaggaaggactttgctctcgagtaagcacactgggactctacatggaagccaacagacaggtacccaaattgctgtctgttctttgtcctgaggaatcaatgatccatccatcagcccagattgccaacaaacacctgattggagccgacagccttatcgggtcagatacacaagttggagagaagtcatctattaagcgatctgtcattggctcatcctgtgtcatcagagacagagtaactgttaccaactgccttctcatgaactctgtcaccgtgggagaagggagcagcatccatggcagcgtcatcttcaacaacgccgtggtcgaggcgggcgcggagatcagggactgtttaattggaagtggtcagaggattgaagccaaagctaaacgcatgaacgaggtgatcgtgggaaatgaccagctcatggagatctgaatcctgaacaagtctgaccccac

SEQ ID NO: 4125 - DNA, 1204 bp, Rattus norvegicus
  Genbank Accession No. U38379
ccgcgatggcaagcctgggccgcctgctgtgcgcatgggttttgctgctgtgcgggcttgcaagccccgggctgtccggatcctatgagcgcggctccaagcgtcccatcatcggaataataatgcaagaatgttatgggaacatgacgaagttgggaagattctacattgctgcgtcctatgtgaagtttatagagtctgcgggtgcaagagtcgtgcccataaggctcgaccttaatgatgcacagtatgaaacactttttagatctattaatggagtcctcttgcctggagggggtgctaacctaacacattcaggttattcccgtgtggccaaaatatttttcaccaaggctctagagagttttgataatggagactattttcctgtgtggggaacatgcctgggattggaggagctttccgtcctggttagtaatgacaacttactgacactcacaaacaccagctcagtgaaattgcctttgaacttcacgagagattcaaagcagagcagaatgttccggaatcttcctgaggagttattgaattcattagcatcagaaaatctgactgcaaattttcacaagtggagcctgtctgtgaagaactttacagaaaacgagaagttaaagaagtttttcaatatattaacagtcaatacagatggcaagactgagttcatttcatccatggaaggatataagtatccaatatatgctgtccagtggcatcctgagaaagcaccatttgagtggaagaaactgcgaggcatttcccatgcaccgaatgctgtgaagacttcattttacttagcaaaattttttatttctgaagctctgaaaaatgatcaccactttgagaacgaacttgaagagactgaatccttgatttaccagttctgtccagtttatactggaaatatttcttcatttcagcaagcttatatgtttaactgaaagacttcaatatggtaacagagcaactttgagtaattccgtgattgaattgctaacactgctcagggcagtgtgagaaagccacacagatgcctttgctgtgtgcctggttctgattcatggcttaataatgattatttttatcagatttgataacccgacaatgaaaaagataaaaaaaaatcatagtgtttttagtgaaaatgccttcttaggtctgaagattctaaaaatacaagtttttg

SEQ ID NO: 4126 - DNA, 2118 bp, Rattus norvegicus
  Genbank Accession No. U39206
tgagagaaggtggctgcttaagaccacccatactaagttagacagagcactgaacctggttgcttatttctccataaccaactctctgaagccaaacagccagagtgatcctgttggcttcagacaggggggtttccaggatgccacagttggacctgtcctggctgggactgaggctggagacatccttaccatggctgcttttgctgctgatcggagcttcctggctcttggtccgtgtcttgactcagacctatatcttctacagaacatatcaacatctttgtgatttccctcaaccacccaaatggaattggttcttgggtcacctgggcatgatcactcccactgagcaaggtctgaagcaggtaactaagctcgtggccacctacccccagggcttcatgacatggctgggtcctatcctccctatcatcactctgtgccaccctgacgtcattcgatctgttctcagtgcctcagcttcggttgccctaaaggaagtaatcttctacagctttctgaaaccctggttgggggatggactcctgttgagcgatggtgacaagtggagctgccaccgccgcatgctgacacctgccttccacttcaacatcctgaaaccctatgtgaagattttcaacgacagcaccaacatcatgcacgccaaatggcaggacctggcctcaggaggcagcgcccgtctggacatgtttaagaacatcagcctgatgaccttggacagtctgcagaaatgtgtcttcagttttgatagcaactgccaggagaagcccagtgagtatatttctgccatcttggagctcagtgccctagtggccaaacggtaccagcagctgcttctacacacagactcactctatcagctcacccataatggtcggcgcttccataaggcctgcaaattggtacacaacttcacagacgctgtcatccagggtcgacgacgcgctctccccagtcagcatgaggatgatatcctcaaggccaaggccaggtccaaaactctggatttcattgatgtgctgctgctgaccaaggatgaagatggaaaggagctgtcagatgaagacattagagctgaggctgacaccttcatgtttgaaggccatgacaccacagccagtgggctctcctggatcctgtacaaccttgcaaggcacccggaataccaggagcgctgccggcaggaggtgcgggagctgctgagggaccgagagtctacagagattgaatgggacgacctggcccagctgcccttcctgaccatgtgcatcaaggagagtctgcgactgcatcccccagtcacggtcatctcccgtcgttgtacccaagacatcgtgctcccagatggccgggtcatccctaaaggtgtcatctgcatcatcaatattttcgcgacccatcacaacccaactgtgtggcccgaccctgaggtctatgatcccttccgcttcgacccagagaatatcaaggacaggtcacctctggcttttattcccttctccgctgggcccaggaactgcataggacagacttttgccatgaacgagatgaaggtggcactggcgctgacgctgctgcgcttccgcgtcctgccggatgacaaggagccgcgccggaagccagagctgatcctgcgtgcggagggcggactgtggctgcgggtggagccactgagcacacagtgactacgtacatctggacgggtcccacccacccacatacctttgtagatgtcacctgtgcctgaggctccttgaataccagtagggggctctggaggacaacagggaaccagcagttgtggcagggagggagatggggttggtgcccaaattcctgacttcatctggccgttcgtgggcctctacactgtcctttagcctagttggacttactctcttgggcgacagagagctaaggtaagtgtctaagcaggctcgagctcacagaatcttttaaattgaggtacatttcctgccttgacctccattctaatctcaaaactctcatcctgggattctgaagtgtttctgtgaaaactaaaattttaggtttattaaacctaacaagtctgccaaaaaaaaaaaaaaaaaa

SEQ ID NO: 4127 - DNA, 1778 bp, Rattus norvegicus
  Genbank Accession No. U39943
atatcagccatgcttgtcacagcgggttccctactaggggccatttggaccgtgctccatctccggattttgctgctggctgctgtcacctttctgttcctggctgatttcctcaaacaccggcgccccaagaactacccgccagggccttggcgcctgcccttagtgggttgcttgttccatttggatcctaaacagccacacctatcccttcagcagtttgtgaagaaatatgggaatgttttaagcctggattttgctaacattccttcagtggttgtaactggcatgcccttaatcaaagaaatctttactcaaatggagcacaattttttgaatcgccctgtcactcttctccgaaaacatctctttaacaaaaatggattgatcttctccagtggccagacatggaaggagcaaaggaggtttgccctgatgactctgaggaactttggactaggaaagaagagcttagagcagcgaatacaagaggaagcctaccaccttgtggaggccataaaagatgagggaggactgccttttgaccctcacttcaatatcaacaaagcagtctctaatatcatttgctctgtcacctttggggagcgctttgagtaccatgacagtcagtttcaggagatgctgaggctactggatgaggccatgtgtttggagtcatcaatgatgtgccagctctacaatatctttccaaggatacttcagtatcttcctggatcacaccaaacacttttcagcaactggagaaaactgaagttgtttatttctgatattattaagaatcaccggagagactgggatccagatgagccaagggacttcattgatgctttcctcaaggaaatggcaaagtacccagacaagactactacaagtttcaatgaagaaaacctcatctgcagtactttggatcttttctttgctggtacagagacaacatccactacactgcgctgggctctgctctgcatggccctgtacccagaagtccaagaaaaaatgcaggctgagattgacagagtgattggccaaggaagacagccaaacctggcagaccgagactccatgccctacaccaacgccgtcattcacgaggtgcagagaataggcaacatcatcccctttaatgttcccagggaagtggcagttgacacctatttggctggatttaacttgccaaagggtactatgattctaaccaacttaactgcactgcacagggaccctaaagagtgggccaccccggacaccttcaacccagagcactttttggagaatggacagtttaagaagagagaatcctttctgcctttctcaatgggaaagcgagcatgtcttggagaacaactggccaggtccgagctgttcatttttatcacttctcttatccaaaaatttaccttcaagcccccggtcaacgagaagcttagtctgcaattcagaatgtccgtcaccatttccccagtcagtcaccgcctttgcgcaattcctaggctgtgatgtcgaagaggaaagtatgaagaaatggcatctgcatggaggacactggtgtctgctcacattgaggggatagaattaaagatgactgagggagtgtgtgcaatgagactaaggaaattgaatcaagttatgggttcattaagtagaaagccacttgtgagctcaatggtacagcttcacgactgacatcttgcagagaaaaatgattcttccagaaaagaaaatgattacgggaccatggagaatggaagccgaattcc

SEQ ID NO: 4128 - DNA, 1806 bp, Rattus norvegicus
  Genbank Accession No. U40004
ggaatatcagccatgcttgtcacagcgggttccctactaggggccatttggaccgtgctccatctccggattttgctgctggctgctgtcacctttctgttcctggctgatttcctcaaacaccggcgccccaagaactacccgccagggccttggcgcctgcccttagtgggttgcttgttccatttggatcctaaacagccacacctatcccttcagcagtttgtgaagaaatatgggaatgttttaagcctggattttgctaacattccttcagtggttgtaactggcatgcccttaatcaaagaaatctttactcaaatggagcacaattttttgaatcgccctgtcactcttctccgaaaacatctctttaacaaaaatggattgatcttctccagtggccagacatggaaggagcaaaggaggtttgccctgatgactctgaggaactttggactaggaaagaagagcttagagcagcgaatacaagaggaagcctaccaccttgtggaggccataaaagatgagggaggactgccttttgaccctcacttcaatatcaacaaagcagtctctaatatcatttgctctgtcacctttggggagcgctttgagtaccatgacagtcagtttcaggagatgctgaggctactggatgaggccatgtgtttggagtcatcaatgatgtgccagctctacaatatctttccaaggatacttcagtatcttcctggatcacaccaaacacttttcagcaactggagaaaactgaagttgtttatttctgatattattaagaatcaccggagagactgggatccagatgagccaagggacttcattgatgctttcctcaaggaaatggcaaagtacccagacaagactactacaagtttcaatgaagaaaacctcatctgcagtactttggatcttttctttgctggtacagagacaacatccactacactgcgctgggctctgctctgcatggccctgtacccagaagtccaagaaaaaatgcaggctgagattgacagagtgattggccaaggaagacagccaaacctggcagaccgagactccatgccctacaccaacgccgtcattcacgaggtgcagagaataggcaacatcatcccctttaatgttcccagggaagtggcagttgacacctatttggctggatttaacttgccaaagggaccctaaagagtgggccaccccggacaccttcaacccagagcactttttggagaatggacagtttaagaagagagaatcctttctgcctttctcaatgggaaagcgagcatgtcttggagaacaactggccaggtccgagctgttcatttttatcacttctcttatccaaaaatttaccttcaagcccccggtcaacgagaaggttagtctgcaattcagaatgtccgtcaccatttccccagtcagtcaccgcctttgcgcaattcctaggctgtgatgtcgaagaggaaagtatgaagaaatggcatctgcatggaggacactggtgtctgctcacattgaggggatagaattaaagatgactgagggagtgtgtgcaatgagactaaggaaattgaatcaagttatgggttcattaagtagaaagccacttgtgagctcaatggtacagcttcacgactgacatcttgcagagaaaaatgattcttccagaaaagaaaatgattacgggatcatggagaatggattaagtgactatgtaaatcataaaaacgatcataaaatttatacctttactttgaaaaaaaaaaaaaaaaaaaa

SEQ ID NO: 4129 - DNA, 3326 bp, Rattus norvegicus
  Genbank Accession No. U41164
acttccgggtttagccggcagcgcagccatttgtgtgtgtgtgtgtgtgtgtgtgtgtgtatgtgtgagtgtgtgtgtgtatgtgtgtgtgcgtgcgtgtgtgtgtgtgtgtgtatgtgtgtgaaggcgccttcagtggcccggctttgtggctgggctcagtctgcacggagcgacctagcggatgctgactcgaagtggaggccagaccccggccactcgaatcatgtcggatgtgcttcaggatcggggcaggaagcgcttggcaccacgccacacccggaggggaccatggagcagcaagatgatgagtccccggagaccctgcaggcctgtgtggagaactttgttctaccccaagagatgatcatcgaagtggagggagaagatgctgggtcactggacatcttgcctcaggagagcacagacttcaagattgtgactgtggacctcacggaggagggacagagcacttggagcaaggcccagagaaccccagagagacctgtgaccctggcaggccctggaagggacctgtgggattcgacagctgtacacagaacagaagaaacaacctcaaagcagaccgtctttgatgaagaaccatcccatggatcgaagccagaggtgttggcaagagatgatccttggctttcttcatgtgaggagcagttggagaaacaacaggacaagcaagaggagggggtcttgacccagggtagtgctggtcctcccgagactgtctatggggatcctggctttgacaggagttgcctgagtaccagccggccttcattccccatgatacctctcagaaaccattttcataaacaagcgtcacatgttaaaaagttacatggtgatgttgcaaatagtcaccaacagatcaacaacaatgcggatttctttgaagatgacaaatctgggaaagttcctcagagtcttcatcccactcagtgtataagaaccccgaaaggaaagaaagcctgtgaatttaatggtcgtgttcaaccctttggccaaggtgtgcccctaaatctaaatcaaaaagttcatttggaaggtaaaagctttggctttaaagggcgcgggcaagttttgaaccgtaacatagtcctcaatgagcaacagaagcttctcattaaagaaggccagtataaatgtagcaaaaccgccccaagtccgtctcttccccaaaacctgagaaactactctgaggagaaacgctttgaatgtaagtactgtggcaagtccttcagctggagctcccatctcattgctcaccaaagaacccatacgggggaaaagccgtacaaatgcaacctgtgtgggaagttcttcacccggagctcacacgtcgtttctcatcagaggattcatactggagagaaaccatacaggtgcaatctgtgtgggaagtctttcacccagaggtatgtgctcgtggtgcatcaaagaactcacactggcgagcgtccttatgaatgcaaccagtgtgggaagtcgttccgccagagctacaaactcattgcgcatcaaagaacccacacaggagagaagccgtacgaatgcacccagtgtgggaagtcattcatccagagttacaagctcatcgcgcatcagaaaattcactctggagaaaaaccttatgagtgcagtcactgtggcaagtccttcagccaaagctataagcttgttgcccatcagaggactcacacaggagagaaacccttcgagtgtaactactgtgggaaatcattcagctggagctcccagctggtgtctcatcaaagaacccacacgggagagaagccttacgagtgtaacgagtgtgggaaatcattcaatcgcagctcacaccttgtcatgcaccagagaactcatactggagagaagccgtatcagtgcaagcagtgcgggaaatctttcagtcagagttacgttcttgtcgttcaccagaggacacacactggggaaaagccctacgagtgtggccagtgtgggaagacattccggcagagctcctgctttacccagcatcagaggactcacaccggagagaagccctatgagtgtaatcagtgtgggaagaccttcagcctaagtgcccggcttatcgtccaccagcgaacccacactggggaaaagccctacaaatgcagccagtgtggcaaagcctttattagcagttctaagcgcagtaggcaccaggctactcacagcgaggagtcctgcaagtcctgaccagttgagagtctgagctggagttgactcctgtcagtccaatcctctgaagttccgtctgaaggaatgcacttgaccagaagtgtcagtgtgagaagaatgcacacaggcctttcctcaccccgtgtcagtgacagaaaggagtaagtaaggccttcggtttggcagatgtggataagaggtccctgtagaagaaaagctgttacaccctggcagtggcgcgtactaggatgactgcaggcatcgtccctaagccaatctcaaaaggccacctttaactgtcagaaatcgtttcccaaagcactctgtgtacagagaaggcagaagctagacttagaaaaactgaatgctagatcaaatactgcaagcttagtgcagaagccctcttgttggtgagttcggcctggtccttgagagcacagcttctctgttgcaaagctggcaccctgtagatttcgttcaggaggtgtgcattctaaatgctcttacttagggaagttaactgctggccagcagctttgctctcctcctgctggctcttttccttcatgctactaggtggctaagccacgacctcccgccttatccccccgtgcagagtcctcatacctactcacttcaggcaggtgagccattcgatccctcatttatgcaggcttaaccagtcaggttccagtcatagccaaacgtaagctcacttcggagtaccctactgctcttcaaaggagctgcttttctatcgcaaagatttctcttatgctgtccttactagtcattccgtgccatcaggagacaacataggagtcactgccttagagtgacaggtggccattgagttgtcggggccctagtctgctaaaccaagctcatctgagccaaggaatggactcccttgtcctcaaagccccctacagtattgctgtggatgctggccatgagctggaagggtcaggaaatccacaagcagggttaagcttggaccagcatggaggtgaacctgtgctaaaaacccatgactagtgaggctgagtcaagaggcttgttcaagccagcctgtgttacatagcaaaactgtcttgaaa

SEQ ID NO: 4130 - DNA, 347 bp, Rattus norvegicus
  Genbank Accession No. U42719
cagacccgcaactttctggtccgggcttcttgccgccttcgtttggagcctagcaaagagtacttaatcatggggatggacggagtcaccagtgacctcaagggagacccccagtacttgctggactcaaacagttggatcgaggagatgccatctgagcacctgtgcaggagcacccgtcagcgggcagcctgtaccagctcaatgacttcctgcaggagtacagaagccaggggtgccaggtgtgagggcgtcggactctggatccctgagctcagccccagggtcagggcctctcacgaagcagggcctgcttaacagggtaaataaataaaacttttgacagt

SEQ ID NO: 4131 - DNA, 847 bp, Rattus norvegicus
  Genbank Accession No. U44948
acgagctagacctccctagctccgcccgccgcgtgctcccgcctcccactcggaatgcctgtctggggcggtggaaataagtgcggggcctgcgggagaaccgtgtaccacgctgaagaggtgcagtgtgatgggcggacgttccaccgctgctgctttctgtgcatggtttgcaggaaaaatttagacagcacaacagtggcaattcatgatgaagagatctactgcaaatcatgctacggaaagaagtatggaccaaaaggctatggttatggccagggcgctggcacgctcaacatggaccgtggtgagaggctgggcatcaagccagagagtgctcaacctcacaggcctacaacaaatccaaacacttctaaatttgcccagaaatatggaggtgctgagaagtgctccagatgtggggattctgtgtatgctgctgagaagatcattggagctggaaagccctggcacaaaaactgtttccgatgtgccaagtgtgggaagagtctggagtctacaactctgactgagaaggaaggtgaaatctactgtaaagggtgctacgcaaagaactttgggcccaagggattcggctatggtcaaggagcaggggcccttgttcatgctcagtagtggtgtaaacccagtaagcatggcaaagaacctccattaatgtggatggccttaccgcactcaggctgtgcatcggccagcactcagcactgtgtagcacacacgctatgtgcacaatcgggctggacaggaagcactacactctcctgcccatccgctaacgtttaagaacgttcttttacatttggaataaaattttggtttgatttga

SEQ ID NO: 4132 - DNA, 267 bp, Rattus norvegicus
  Genbank Accession No. U47312
cgacatagatgacctaaaagtaacactgagtaggacaagtaccagtccaactccatgcagatccaatggttctggagagcattgcgttcctttgaccaagcagaccgtgccaagttcctccagtttgtctcaggtacttccaaggtgcccctgcaaggatttgctgcccttgaaggcatgaatggcattcagaagttcagattcatcgagacgacagatccacagatcgcctgccttcagctcactggactctagaggatccccggg

SEQ ID NO: 4133 - DNA, 9748 bp, Rattus norvegicus
  Genbank Accession No. U48288
  misc_feature (1)..(9748): n = a or c or g or t
cttctatttaattttttgagaaatacagcactggaaggaaacccagccataataagaaaagctcaacaaatttaacagatcaaaagctgttggcatttatagtatgattggactatttttgtgccactatgaagctatgcataagagacaaaacagagactcagtttttttccacaaggaaagattggggacagaacatgtgtcttgactctcacccacatacagtgtgccacgaataccctcttaactactggtaatatcttaaaaacaaacaaaccctacctgccataaaaattctatcagggctaagtggtggtggcacaggcctttaatcccagcactagggagtcagaggcagcagatctctgtgagttggtgcctagcctgttctacatctagttccaggatagccagtgctgttccacagaggaaaccaaacaaaccaaaaacctccattagagcagaagtaaaacgacaaaagagaagcctgagagcaagtacaggctcagcaacccacacccaagcactccagggacacggtacctgtcacccgcctccgtgtgctaaggacagtcctttctaacagaaggatggaaatttcttctgagggggggaaacanccaaacagagcttgggacgagactggggggagcactgtcttggtaagagggggcttccaacaacactgaggttcattctcggcagaatcccaccttgggggggggtttgggaggaattcaatcttcctttctcttaaagaaattactagcagtatataaaggtgtggtctagattctgtgcacttactggtggcctgaagggaacggaggcatccaacacggaagaacgggggagggggagggtgggggggtggcattgaaccttagacctggtattgaatatttcaaggaagttatattttgggaaattcctccttcactgaaagagtattcaaaaccaaaataagagaagtaagaactggaaagatggctcagtggttaaaaacatgtataatcacatgtatgaccccacacagacatgcacacattcatattaaaaacagagcaaatctcaactcaactttctcacttcttttctaagtaaacatttagaaaggaagatcagagacagtgttttttaccaagctaatccaccccaggattatctctcccattatcactgtctgggtaccctgtcactgggtccacaggacggctcagcagataaaaggttcttgtctctaagtctgatagcctgagttcacttcccaggacccacaaagaagagaacccattcccatcagttgtcttttaacttccattatgtacacagtacccacccaaaataattaaaggtaaaatgagaaaagaaaaagttttagcggtcctgtacttatatatgctaaagtacattgtaaaaactaccaaaaagacaagatatatattaaaagatttgatcattcaagaaactctaatacaacataacctttaatcagaaaattattgtagcaactctttggttgtttaaattttctaaaacgttaaatcatttagttgtgtgtacatgtgtgagtggagcgtgtgctgcggtgctcacgtggaacccagagacgacctttgggaattgtttctctccactaccaagagacttcaggggaactgcgctctggcagggctggcaatagatgcctttacccacgacaccgccttgcaccccttgttttcattttacgttttagttattatcttttgttttcttccaaacagtgtctctatggagcccagggctggtcccaaacagcgactcaggtgctgagagttggacaagtgaacccctcttgctcatttctcaagaaaatccctaaggaaggactggccttcttaacttttagaaattattatctaggggtgaaaagatggagccgagtctgggtccccaggacccacaggacaacaagacaaggtagaagacgttcataaccccagcactggggagatggacacgcggtccctggggctctggcctgccagtctagcttgagtcagcaagttccaagttcactgacacactctgtcccagaaagtaaggtagagtgactaaggaagctgctcatgcactagtaccacatataacatgtatacacactcatatatgtacacatccacgtgaattatctaaataccatactctctgagaaaaaatacagctgcttcatgttctagacataacctagcctataataccattctttgtgtctaccacttacaactgaagagccatgcaaagtgtccacacgttaatactgtgctacactctaggatacacaaggtgtggtggctggcgcatgcctgtgacagctggaggcaccaggatctgtggaagttagaacagcttacaagaacaggctctttccttctgctgtgtggggtgcacgcgcgcacacgcgcacacacgcgcacacacgcacacacacacacacacacacacagcctgtaaacggaaagcatcctagtcctagccggtcagccacggactgcggggagcctcacgcttactccactgcacatctcctccttacagactcaggcttggaagccaccgttcccaggatggctgccactacgtaacataacgggagaggtcccagaactcattagctcctacagggataccttcctcaacttttaccacatttacctttcctggtcctaatcccgccccggtgcctcgtgccgaattcggacgagggattccatctgatacgcagacctgcaggctgtcctttctcattttggttcttcttttattaaatagatcaaaagcatttgagagggaagagagagtacaagaagagttgagaccattgtcagaggtctcctgtgcaacttgagggcttttcacaagtcccccgccctataggaagacctagggtcagagacaaaagcttcgtccttgctttcacactgggtgatgtttttaattcccccctcccctcctttttttttcttttttgatggcagtagaagggagatcattagacctgagacacttgtattcctgtctacatcattggttttcaatcaacagaaccatttcctggataccaggctggggcagattatgctttgcgtcccagatgtagttaattgtggcatttcctaagagtcattcatttaatagcattgtagatgtataaacatagattgcagtgactaatatgtatcaattctttattctccctgcctcccccgccccttctgtatttaggctccataaaaactcttagcagtcctagttgtatccatttcattgttgtcgtagatgcaagaagactgtcctagtgacagggagagccggagggactccgttctcatcgattcgctcttcatcatggaccagtttaaagctgcagagagaatgagcattggaaaatccaacacccaaggacatcacagaagttactgctgtggctgaagccatcctccctaagggcagtgcccgagtcacaactgcggtgaagtttagtgctccatctttgttgtatggtgctctccgagactatcagaagataggccttgactggttggccaaactataccggaagaatctcaatggcatattagctgatgaagcagggcttgggaaaactgtgcagatcattgctttttttgcccaccttgccctgtaatgaaggtaattggggccctcatcttgttgtcatgaggagttgtaacaatactcaagtgggaactcgagttgaaacgctggtgtcctgccctccaaaactctttcttatgttggcacccacagagaactcaaaccaaagagacaggtagtgccaccccactgccactgccctctctctttctttgttttgcattgctggagatgtatccaggttccacatttcctagacgaggcgtgtgccggggaattatgcctttagtcaagtatcttttttatcttttgtcaagtatcttgtaagcatgttgtacaggtgctggagagatggcccagcagattaaaaagcacttgctacataaacctgacaattttgatccctggaagccatgggaaggtacaaaggagagaaccaactccacaaagttgtcttctgatccctataggcatgctgtggtacatacacatctacatagacatatcttacacgtcccttgataatatttgtgtgaaataaagctaaacaccttaatttttcttaacataaaatcttatgtatcccaggtttcaaacatttgatcttcctgcttcggctacattgagacagttacatgctgcttaatgtgtcccattgacacactgacctatactcagtttctagagtttgatcccccatgaaccagagaggacacaagatggactcctagttctctgggaaaaagctgcttcttatgcttgaggccctgtttcccttctgtgctacagatgtaatagagtcctttcttgacatgtatgggccctgagttcagttcccaatactgtaaggaaaatagttcagaatggagtatttgtctggagaaagaatcaatacttcctacctcaagactgtgctaatggagtgtatgagacctccctgtgtgttgtatttcctctggaataaacaggaatatttgtgacaagataccagtttcctttagtccccagtacttaatagttccagtcccaggtggctatgtaaagatcatttctatcatttgaagttttgcctcactgttagacactatgtcaagccaaatttactaagagatcctttaccatctatcgtaatcttttttccctgctgtaaaaaaataaacaacctcgtgccgaattcggcacgagatgtaaaaaatcttcagtgattaccgatagcgttcagaagtttgcagcagatcttgtgggaaaaagttttggcagtgcatttaaagacttacagaaaggagtttcttcatgtaccaatgcactgtgccacctggctgtcaaattgacatcatccatatttcagatggcatttaatgaactaagaaggcagtgtgcattttcattaaaggagcgagccattggtagcctggccagtcttttggtgagcgaagccttatcaaatgccttgaaagacttacagtatgtgaaaagcagatgtttacaaacacagttgctaggtttgctgcagacctggctgaagagcttgtttttgaaggtatcatggaagtgtgtcattttcatgtcctcagacacctgcatcttcacagtgtcagtcatttgactttgaagacaaagtcgtgaagtcatatgcccaaagagttgtctgaatctgtaatacaagaagcattcatagagctgtcacagacggacgtgaccttcacagcaaagacagcagttaatgtttctatgggtagtgtcaagtccgtgaatgcagaaaatgcagtgccacctgcgcagacccttacattcctcctcatcctttagcagtcaagcagttatgatgaccaaaccaatgcaggagcataagaaggaatacacggcacagcaggctttgtttcgtccctcaggaattgtcacttccataccagtgcccttggcaggtagtgcccttctcccatatcacgtgtcatctactttgtaccagtccaagtctctgtcatcgtctgagcataataaagcaaatggcggttctccccaagagcacattgccatggaaagcagtgcagaggaagtggattgttttaaaaacacctgtctaccttcagaactcagtccttgcagccagaatgacttcaaaccaactaatggtgatatcgacatgcagagtccttcaaaattaatgagtggctctatgattattagcaacttttccacagcaatggtacatacaatagtaaatgaaaccttagagtccatgacatccttcaaagccacaaaacctgttgatacaaatgcagattatttaactaaaacaataaagggaaagcctgttctttccctttgcgaccaagcagcaccacaacagaacaaagctagcagtaaggacatgtttgctgagcatttatcaaagtctattattaaacattccctggataaaagcaagtcagtccttccaaatatagataaaaaaccagttagtaaggaacacatgcttgttcttggagaagaatcacagttgaccttgggggaaactcccaaattccttgacttttcagataattcacctcagtattgtgttccagaatgtaaagattctgtgggttttggtttttctttagaggcactgccaccttgttcaatgatgacaagtcagaaatctgacttgaagggagttatgaaggataaagtggtaacaagacacaatctgactaatactgcgtttgagcccttgtcttttggacaggaaagctctttccgtccctcacagactttatcatctgcagtgcttacctgtgtagatagtttgcatgtggaagataagcagaaaatcagagacagaaatgtgatacctgatactcccccatcaacacctttagtaccatcccagactagttctgaatgggacatcaaaaagttaaccaaacaactcaaaggggagttagccaaagaatttgctcccgcaacaccaccttcgacacctcacaactcatccgttggtagtttatctgagaatgaacaaactactatagaaaaggaagagttcatgctgaaactcatgcgctctctttctgaagaagttgagagcagtgaaggtgaggagcacccagaaatggatgtaaagtcagagcattcagggaaaaaaggtcagtttgcagacgcattagctacacacatcatttctcttgcaactgaagtggcagcctcccacttagatcatgaaatcactcaagaattcaaggttcaaaactctcacttaactgtgccaagtcaaagaagcatgctgcctgctctaagtcactcagatgaaagcatacagacgtgcagttttgcaagtgatatggcagctggtgttattgcagaagccgagaaagttgcaaacactagaagttgtatgcttttcgggcatgagaggaccatttgtcatgttgaaggtgatcgaggtaaagcagaagagaagctggatgtggaggatattgcacatccaagagaagtagaaacgtgtgttctttcattaccaagttgcatgccaggtctgacatacaagtatcccagctgtgaaagtgtgactgatgaatatgctgggcacattattcaagtgctgaaacaggaaggtggcaacagtgagctaatcatggatcagtatgccagtagattggcctaccgttctgtcaagtcaggagtacgagaagcagctaagacagtaaaagtgaagtgcagtttgaaactcttccctatgcacacctctcatgtgaaaacaaacaaggaactgttgttctcaagtaaagagcatcaccaagaagtagataaaaaaagacaaagaaaaaaatatggcagccatccttgcaaataccagacatgtgacaggacacaggatccatgtagaaacgaactttctgaactgtacaggttttcagcctctcttgctagcagcataacaagagatgtaaagaaacagctgacagcacctaaagttgacttgccaaaatcctcaacagactgttgtctttttgaaaaatctgaatgtgttgacaacagagagaatgttactggaccagaattttcaaagtcgtgtcaacctttacaaaaccatggactttgccagaacacaagcagtttaagtgggtatagctgtggagagagtgctcacactgtagaacagtatgctaggaaagtagtgggtgacactttagagctaagcttaggacctgcagttttccttaattcagagaccacaacatcaccagataggattacttatgcagaaaaattgtcaccacttataaatgaagcttgcagatactgtgaccttaaggaatcccatggttgtatcagaaattctgctcagctcttttcaaagcagggtccttgtgctagtgctaagccaagttcacattcaaaacttagtagcatccgccagaaatcaagaatttttcatcttgatgttcctcaaattcatcttaatcttgataagagggcggtgcttgcagagaagatagtcgctgaagctattgaaaaagcagagagagagttgagcaatacgagtttggcagctgatagtggaattggacaagatggcattagctttgctgagagccttaccacagaaatcatgaccacagctatgacaaatgccgggcatgctgttagcagttcaaaagaagtagaagattttcagtccactgagtcacttggcagccaacagatgaatcttagtgttggtgaggacagcacgggtagctggtccaacttaagttttgaggatgaccatcaagatgaaagcagcagtttccatcatctcagtgaaagcagtaatggtaacagcagtagctggagcagtcttggtttagaaggagatttgtatgagaacaatttatcctttccaacatcagacagtgatggaccggatgatagagagagcgaacaggaggatggtgctgagggtttgcagccgagtggaaagactctgctgatcgtgaacattgacgtggagcctggggcggtggaccctcagctcagggtcattcttcagtggctcattcctcggaggcggaagttagagaactttattttcagtactctgcaaagaaggagtttgtcttactttcaaagcagttacaggagagaggatggaaagtgggcgatgtcctgcaggctgtgatgaaatactacgaagtggtggccaaggcctcaagcgaggacacgtgcacgtcgctgtttgattggcttttagaaaatgcctagcacaccgcagggcagtgtactttagtgcttgttttaggaagtaaagaagttgatgatttacatgtaggataaaattcaaatacagaatattaacattttaattgaattgagaggaaagtaagcgtttaagtgctttctgtcattacactgtatatagttcatacttttttgtaatcttgtcaagatatctctttacttattcttctgtatatgtgtatgtgttatgacatgagatatattctgtgaagacctatcctcacccgatgggcattcattgtctgacagcatttgtttggattcacatagtgctgctgctgctgctgctgctgctgctgctgctgctgctgctgctgctgctgctgctgctgctgccaaacagggctgaggcggctggcctggcccacgtgatcacttggttcctttgaaaacaagtggtgtctaatgataagtcatctgacatggaagaaagaaaactgaggctgatattttgttgtttatttatttctgataagtttgtattctttatgtactgttctttaaaatcagttttacttcccagttcagctattggtacttgtagattccccaatctttaagctcgtacatactgcattagtgacttaggtttctgtgaacaccgttatgtgttcccctggctttccatcaagtgatgttatttgctaatactgccaattgttatgagatgagaaggagaagggcgtgtgtgcgtgtgcaagaataaacgctaaccttcccactagttcattcgtttactttagagttttcttaaatagaaacccattattaacactaaataaatgtctaaatattgtgcagtaagaaaaagggggaaaaaaaaaaaaaa

SEQ ID NO: 4134 - DNA, 4794 bp, Rattus norvegicus
  Genbank Accession No. U49055
cccgtgggaggaagaggaaggaggagaagggggtggagagtggagggggccgaagcttgagtgtggagtccgcttccgagcggggcggagaaacagagaaggcgccgcgccagcccctcccccaccaccgacccgccccgacggcctcggtcctgctcgctgcgcccgccccgcgaccatgccgggacctcacgggcgctgaggagcgtctccagctagccgtgctccgcggccttctgggcccgtcgcccgcccttccgcacgcaacgcgcccagccgccgcctcttccttcgccgggccccgggcctctgcgcagacaacatggaggccgtgaagaccttcaacagcgagttgtattcgctgaatgactataagccacccatttctaaagcaaaaatgacccagattacaaaggcagccatcaaagctattaagttctataaacatgtggtacagagcgttgagaaattcattcagaaatgtaaaccagaatacaaggtacccggactgtatgttattgactccattgtgcgacaatcccggcatcaggttggtcaagaaaaggatgtgtgtgcacccagatttagtaataacatcattagcactttccagaatttatatcggtgcccgggggatgacaagagtaaaatagtgagagtattaaacttatggcagaagaataatgtttttaagagcgagattatccagcctctcctggatatggcggcagggattcctcccccagttgtcaccccggttttggccagcaccactgtagccatgagcaacactccaggaacacctgtgacacctgttactccagccaatgtggttcaaggcctacctgatccatgggtatcgcagataacaaacacagacacactggcagctgttgcccagatcctacaaagtcctcaaggtcaacagcttcagcaactaatacagaccttacagatacaacagcagaagccccagccctctatccttcaggctttggatgctggccttgtggttcagttgcaggcactcactgcacagcttacagctgcagctgctgcagccaacacacttactcccttggaccagggagtctctttcaacaagaagttgatggatagatttgattttggggaagattctgagcatagtgaagaatccaaaaaggaaattcctactcctcaactctctcacgtttctgagtctgtgaacaactccatcttccatcagatagcagaacagctgcagcagcagaacctggagcagttgcggcagcagctcctggagcagcagcagcctcagaaggtaactcctcaggacagccaggagggagcatttggctctgagcactcagcttcaccctcacaagggagtagccaacagcattttctggaacctgaagcaaatttagatgattccatagacattcagcaacaggatatggatattgatgaagggcaagatgttgttgaagaggagatctttgaaccagaagctaagaaagtagctgttcgctcaagatcaagaactcattcacgatctcgatcaaggtcaccaagaaaacggaggtccaggtcacgctctgggtcccgaaagcgaaagcataggaagaggtctcgctcccgctccagagagagaaagagaaaatcctcacgttcctattcaagtgaacgcagagccagggaaagggagaaagaacgccaaaaaaagggcttgcctcctgtcagatcgaaaacgctaagtgtatgcagcactactctctgggttggccaagtggacaagaaggctacacagcaagatttaaccaacctttttgaggagtttgggcaaatcgaatccattaatatgattccacccaggggctgtgcatatgtctgtatggttcatcgacaagattcatttcgggctctccagaaactgagttcaggatcctataaaattggttccaaggtcattaagattgcctgggctttgaacaaaggtgtaaagacagaatacaaacagttctgggacgtggatcttggagtcacatatataccctgggaaaaagttaaagtagatgacttggatggctttgcagagggaggcatgattgatcaggaaactgtaaatgctgaatgggaaactgtgaaaacctcagaacccgttaaagagactgtccagacgacacagagtccagctgcagttgagaaggagacagtggtcacaacgcagtcagaggttttccctcctcctgtcaccatgctgcagattcctgtagcaccaaccgttcctgcagttagcttagttccaccagcgtttcctgtgtcgatgcctgtcccccctcctggattcagccccatccctccacctccttttctacgagcaagttttaacccttcacaaccacctcctggttttatgccacctccagttcccccacctgtggtacctccccctgcaatcccacccgtagtaccaacatctttagtgcaaccaccattgtctatgaccccagaaactgtgaaagatgttggatttggcagccttgttttaccaggtggttctgttgctggcaatcttgctccttcaactctaccagctggaaatgtttttaatcctcccagtaaagcagagcctgaagaaaaagtacctcaccttacagaacaccagattccttctggtgagaataccagaccagtgattccaagtgatattccaagcagtgctccaatgttagcacagccgcctggggcctcaaacacctctgggatcctgtgcgtgcagagaccaaacgtatcaagcaattctgaaattctgggggttcgtccagccaatgtttccaacagtgctgcgattatgggagcccagccaccaaatatgctcaataactctggaattttgggcatacagccaccaaatgtgtccagtggctctggacttcttggggtactgcctccaaacttgcctaacaactctggacttgtaggactacagccaccaaatgttacaaatcctgctggacttttgggaacacagccaccaattggacctcaaaacttaccccctttaaccatccctgctcaaaggatgcctgcgttgccaatgttagacattcgtccgggactgatagcacaggctcctgggccaagattccctttactacagcctggaattccaccacaacggggtatccctcccccatcggtacttgacgcagctcttcatccaccaccccgtggaccttttcctccaggggatctttttagtcagccagaaagaccttttctggctcctggaagaccaaatatagacagtgttcctaacccagataaaagaataccacttgggaatgacaatatccagcaggaaggggatagagattaccgctttcctcctatagaaaccagggagggcattaatagacctcctccagtggatgttagggatgtggttggacgacctatagatcccagagaaggccctggtaggcctccgttagatggtagggatcattttggaagacctccagtggacatgagagagactcttgtgaggccaggtctagaccaccttggccgaagagaccactttggctttcccccagaaaagccttgggggcctagagatttcgatgagagagagcaccgagttctgcctgtctttggtggtccaaagggcttacatgaagaaagaggcagatttcgggctggaaattatcgatttgatcctagaagtggtccttggaacagaggatttggacaagaagttcacagagattttgatgaccgcagaagaccctgggagaggcagagggatagggatgacagagattttgatttctgcagagaaattaatgggaatcgtcttggacgagatagaattcaaaacacttgggttccccctcctcatgctcgggtttttgattatttcgaaggggccacttctcaacggaaaggtgagaatgtgcctcaagttaatggtggaaatacagagagacatgctccgccaccgcctttgccagtgcagaaggaccctgaactctatgagaagctggcgtcttcaggagacgcagacaaggaggagagcggcacagctgctggtgtagagagtgaagcggtggtagaaagcacagagactgaggggacataacatcgctcagtaggtaaaagaaaccttttgtacagttgtcatctctgtaagaggttaatggctgactgcaccacagttgttcacgtttatctaccagaactaagttaatctgatgtacgtgttcacctttctcttaaaataattgtacaactgacttgtatagacattgttcttaatatgaacatggtaggtaaacatttttttatttttctgataaagtataaatgttgccccagattcttttaacgtcaaggagatgctaacagcttgtcgagacttcctatggaagagaaggttttagacacagtcattgggatgggtatggcaatgacatatttcagaacagcaaggtgtggcacatctccatatctctaggctgctgcagggttttaaggtgacagacaaagctgtgatattttatgcaaggactggctctagattcttgaggagcataatacagagattttaaaaagtgattttgtaaaaatctccactatggtctctgttactccaaagtaagtgtgtgtgatttgttcctcatactgcagtaagtaaaaaagaaaagaagcaaacaacataaacattcaaatacgttttaatgttgggtgaattttgtttttagatgccaataaaacttatttgtttgaaaaaaaaaaaaaaaaaaa

SEQ ID NO: 4135 - DNA, 4180 bp, Rattus norvegicus
  Genbank Accession No. U49058
tgcggccgccgctagccggctgggctagtgtgagccagtgcgtgagggcgcggggggccgtgtcagcgcgacgcagagcgcagccgccaccaccaaacggacatgttggagccccgcgctgccgctgcctcccagctctcctccagctcacagaactgagcaggggcccgccgcctctgtctgcgctcgaccggcccagcctcgccgcctcggccgcagacccttcctgctcggccttcgccgcttgtcgcctcccgtcctcctcccccccacgccctagggccctgccggctcccggtcctactcagccgcggcgcgaggtctatgtgaccggcgggcccggagcagccgccgccgcaacgcgaacatgggacgccgtcaacgccttcaaccaggagctcttctcacttatggatatgaaaccacccatctctagagccaagatgattcttattactaaagctgctattaaagctattaagctttataagcatgttgttcaaatagtagaaaagttcatcaaaaagtgtaagccagagtacaaggttccaggcctgtatgtcattgactccatcgtgagacagtctcggcaccagtttggaactgataaagatgtttttgggccaagattctctgagaatataactgctacattccagtatttatatctttgtccatctgaagataaggctcacctccacccccagtaaaagtctcttctgaacttccacaagctcccacaaactccatgcctgctgtcccacagctgcccagctccgatgcctttgctgccgtggatcaactgtttcagacgactcaaggccagcagcttcagcagatccttcagacttttcaacaacctccaaaaccacagtctcccgcccttgacagtgctgtgatggctcaggttcaggctatcacagctcagttaaagacagctcctacacaaccacctgagcaaaaaactgcatttgacaagaagctgcttgacagatttgattatgatgatgagccagaagctgtggaagactcgaagaaagaggatgctgtcgccgttgccaccacagcccttgccacggctgcacctcctgtgcccgctgcagccacacctgctgttgctcctgctgtgcctgcgtcctctgctacctctccccctcctccacaggcgccatttgggtaccctggagacggcatgcagcagccagcgtacacacagcatcaaaatgtggaccagtttcaacctcgaatgatggcactgcagcaggatagcatgcagcatcaggtcccacttcctcctaacggacagatgccaggatttgggcttctctctgcaccacctccatttcctcccatgcctcagcccgggatgccccagcccgggatgcctcagcccgggatgcctcagcctgggttgtctcagcctgggttgccccagcccgggatgcctcagcccgggatgcctcagcccgggatgccccagcccgggatgccccagcctgggttggctcagcctgggttggcccagcccgggatgcctcagcccgggatgccccagcccgggatgccccagcccgggatgccccagcctggaatgcctccaactccaccagtacagccaactttccaacctacttttcaaccacaaaatgaaccccattcacaaaagccacatcagcaggaaatggaagtagagcagccttgtgtcacagaggttaagcggcatgtgcctgagagcagaaagtcgagatccaggtcaccaaaaagaagaagatctaggtctggctctaggtctcggagatcccgccaccgtcggtctcggtcccggtccagggataggcgccggcactcgcctcgctctcgctctcaagaaagacgggatcgagaaaaagagagggagcggcggcagaaaggcctccctcagatcaagtcagagactgcaagtgtttgcagcaccacactgtgggtgggacagctggacaaaaggactactcagcaggatgttgccagtctcttagaagagtttggtccaattgaatcaattaacatgattcctcccaggggctgcgcctacatagttatggttcataggcaagacgcataccgtgccctgcagaaactgagccgaggaaactataaagtgaaccagaaatccataaagattgcctgggccttaaacaaaggaataaaggcggattttaaacagtattgggatgttgaacttggtgttacttacattccatgggacaaagtcaaagctgaggagctggagagtttctgtgaaggaggcatgttggacagtgacacacttaacccagattggaaaggcatccccaaaaagcctgaaaatgaagttgcccaaaatggaggtgcagaagcctcccacacagagccagtgtcccccatccctaagcctgtgcccgtgcctgtgcctgcccttcctgttcctgcacctataacagtaccacctccacaggtcccaccgcatcagccgggccctcctgtcgttggtgctctccaaccgcctgctttcactcctcccttagggatcccccctccaggctttggccctggtgttcctcctcctcctcctcctccaccaccattttggggcccaggattcaacccaatgcatttaccaccaggttttcttcctcctggacccccacctcctataactccaccagtatccattcctccacctcacactccaccaataagcatcccaaacttggtgtctggggctagaggaaatgccgagtctgctgacagtgcgaaaatgtatggttctgctgggccacctgctgcacccacgagtctgcccacccctcctgtaacccagcctgtttcactgcttggcactcaaggagttgcacctggtcctgtgattgggctccaggcaccctctaccggtcttctcggtggcagacccggcctgatcccactccagcgccccccaggaatgcctccaccacacttgcaacggttccctatgatgccacctcggcccatgccacctcacatgatgcacaggggtccgccaccaggaccagggggctttgctatgcctccacctcatggaatgaaagggcctttcccaccacatggcccctttgttaggcctggtggaatgccagggcttgggggcccaggcccaggcccaggaggatcagaagacagagatggaaggcaacagcaaccgcagcagcagcagcagcagcagcagcagcagcagcagcagcagcagcagcagcagcagcaaccaccaccacagcagtcacagacacagcagcagccagcgccatcccagcagccagcgccagctcagcagcagccacagcagtttagaaatgataacaggcagcagttcaactcaggtagagaccaagaaaggtttggaagaagatcttttggaagtagggtggaaaatgaccgggagcggtatgggagccgtagtgatgagagagataatagcaaccgtgaaaggagagagtggggaaggaggagccctgagcgggacagacacagagacttggaagagagaagtagacgctctagtgggcatcgggacagagacagggattctagagatagagagtcccgtagagagaaggaagaaagtagaggaaaggagaagcacgaggtggcagacagggcaggtggtaacaaagctgtcgaagctccccttagccaagtgggaaacacagacactgtttcagaacttaataagggggaggccatggccacagtggtaaaacctgaagagtcacctgctgaggctacctcatccgttgaacctgagaaggattctggctcagcagcagaggctcctcgctagagactggatttgacagaatgtgacagtgacacttgggtgtagaacgtgaggtgtacagatgctgtataatattcgctcctgctacatcactccacagtagttggtggggattgtgagcaatttgattgctttccttctatttaaaaatagccacaaaataacaaaaaatactgaagatatattacccctttttttgctgtaactttttaaaagttttgacttttaaaagtttacaaatcctaattagaagtgctctctattttttttttttaatttaagaaaaggtaacggtgaaaagctcctcaaacaatagggatgtttttaataaactctattttcgtaacc

SEQ ID NO: 4136 - DNA, 1384 bp, Rattus norvegicus
  Genbank Accession No. U49694
cgcctcccaggctcattcattcggggacgggcctgctggacacctgttctcagattccgccgccgccgccgtcgtccgccgtcgcagccaagatgtccggccccaccacagacacgccggccgccatccagatctgccggatcatgcgtccagatgatgccaatgtggctggcaatgttcatggagggaccattctgaagatgattgaggaggccggggccatcatcagaacgcggcactgtaacagccagaatggggagcgctgtgtggctgccctggcacgggtggagcgcactgacttcctgtcacccatgtgcatcggcgaggtggctcatgtcagtgcagagatcacctacacttccaagcactctgtggaggtccaggtccacgtgatgtcggagaacatcctcacaggtaccaaaaagctgaccaataaagccaccttgtggtatgtgcccctgtcattgaagaatgtggacaaggtccttgaggtgcctcccattgtgtatttacggcaggagcaggaggaggagggtcggaaacgctatgaagcccagaagctggaacgcatggagaccaagtggaggaacggagacattgtccagcctgtcctgaacccagagccgaacacggtgagctacagccagtccagcctgatccacctggtggggccctcggactgcacccttcatggcttcgtgcacggaggtgtcaccatgaagctcatggatgaggtggctgggattgtggctgcacgccactgcaagaccaacatagtaactgcctctgtggatgccatcaatttccacgacaagatccggaaaggctgtgtcatcaccatctccggacgcatgaccttcacaagcaataagtccatggagattgaggtcctggtggacgctgaccctgtggtggacaactcacaaaagcgctaccgggccgccagtgccttcttcacctacgtgtccctgaaccaggagggcaagccaatgcctgtgcctcagcttgtgccagagacggaggatgagaagaagcgcttcgaagaaggcaaaggccgttatctgcagatgaaggcgaacagacagggccacacagagcctcagccctaggtgtcttcctcctgtcccgggtcagcacagttgtggcaatagccagtatgcagtcacttagaaattgcccccttggccaaacccccgatttccactgagagctggtgttgtgtgaagtgttgagtggcagtgttccctatggcccatccccaaaacctgtgcaccaaagctttatttatgtccccagtgttgtcccaaaggccaccatggacaccagagcacaccgactggcctgaagaagccagcatcactaataaagctgctgtctggctgga

SEQ ID NO: 4137 - DNA, 2450 bp, Rattus norvegicus
  Genbank Accession No. U51013
cgcggccgcgcgcgggctgagcggcggcgatggcgcaaggcggacggcgggcgcgcggcgcggggccctagctgggcgggcgtgctcgggacggcgcggtggccgcgcagccatggccggggagctgcgccgggcgctgctggagctgctgacgcgtccggggaactcgcgctgcgctgactgcggagccccggatcctgactgggcgtcctacaccctgggtgtgttcatctgtttgagctgctctgggatccaccggaacatcccccaggtcagcaaggtgaagtcagttcgtctggatgcctgggatgagacccaagttgagttcatgacatctcatgggaacgaggctgccagagccacatttgagtccaaagtaccacccttctactaccggcccacgttctccgactgccaactcctacgtgagcagtggatccgtgccaagtatgagaggcaagaattccttcatgtggagaaacaggaaccgtactctacaggataccgtgagggccttctctggaaaggcggtgggccgggacaatggacagttcttaagtcggaagtttgtgctgacagaacgagagggtggcgtctgaaatacttcaacaaaaatgacgctaaggagcctaaggctgtcatgaagattgagcacctgaatgccaccttccagccagccaagatcggccacccccatggcctgcaggtcacctacttgaaggacaacagcactcgcaacatctttatctaccacgaggatggcaaggagatcgtggactggttcaatgcgctgcgagcagcccgcttccactacctgcaggtggctttcccaggagccagtgacgcagatctggtgcccaagctctctaggaactacctgaaggaaggctacatggagaagacagggcccaagcagacagaaggctttcggaagcgctggttcaccatggacgaccggaggctcatgtacttcaaagaccctctggatgcctttgcccgaggggaagtcttcattggcagcaaggaaagtggttacacggtcctggagggcctcccaccgtcaacccagagtcaccactggccccatggcatcaccattgtcacccctgaccgaaaattcctgttcacgtgtgagacagagtcagaccagagggagtggatagcagccttccagaaggtggtggacaggcccatgctgcctcaggagtacgcagtggaagcccacttcaagcatataaaccctaaggaagagagcccggaggccccaggattctgcactcgtgtggcggctcagctggacagcaggagagcctatgttcctcggtgtggcccaggcatggccaggtggggctcaggcaagcccatcagatagacagatttttcagaacctcattaaagttgaaggcagacttggttctgggcctcacttgaacccctggccctgtcatgacgctcccagccatgcccagccgacccacccattttcctgctgctggaggaagccctgcctcccaacttgagcaggaccctactaactcttctggcctgaggggatcttggcctcaggacaggacttggtgctgggctgctgtggacagccatggacagccatgaacagctgtggcagcgggctggcctggctgctggactcactctgggatgtgcagcatgcctcccctcctctcactcttccacttcaaacaagtatattattgagctacctgctgtgtgtcagtcagggatcaagggtcaggggtcagctctccttcccctagggctgacccagctggagggattgggggtcaggtatttttccaagagaactgtgtgcataggccctgcacccacctgtttgccccacccccccacccccaggccccttgggacagctggctggagaaaccagggagggagacctagcctgcagggtgctgtgcatggagcccaggagcggtttccttgggatgacaggaggccccccaatcccccatctgactttttggagctgtcagtgccccagctcggtgctgtccccagcattgtaacccatgccctctgccctgcccttacagtctttgagccccttgatgaatgaaagcccaaggaccaagaagtggtcattggcaggaatggctgccccccagccctgattgctgctggcaggccagtagttaaagctacctgtatttatttcccccactgccctctggccaccccaacagatgggctcccttctatgggatccccaaaagggcaggtcctggccagctggacagctggggagcattgatgggggacccatctgtgaatgacctggtccctcctcaaagctaagccctagggacctggggggaggggtccttagttgggcttctgctgccctgctgtcatgtcgcctggaataaagtgtggctctggcgttgtaaaaaaaaaaaaaaaaaaaaaaaaaa

SEQ ID NO: 4138 - DNA, 2813 bp, Rattus norvegicus
  Genbank Accession No. U52102
cccctctagatgcatgctcgagcgcccgccagtgtggtggaattcccgagtttctgtcctttctttcgtccctcccgggcctttgtcgcagctcccacgagtagcgcggccgggagacccgggtagagcgccaggcagacgttagttccagcggccgggcggagggctccagaggggccatgtctcatcaggggaagaagagcatcccgcacatcaccagtgaccggctcctcatcagaggcggacgcatcatcaatgatgaccagtccttctatgccgatgtctacctagaagatggactcataaagcaaataggagaaaacctgattgttcctggtggagtgaagaccatcgaggctaatggccgaatggtcattcctgggggcatcgatgtcaacacttacctgcagaagccgtcccagggcatgacctcagccgatgacttcttccagggcaccagagcagcgctggcaggtggaaccacgatgatcattgaccatgttgttcctgaacctgggtccagcttgttgacttcctttgagaaatggcacgaagcagcagacaccaaatcctgctgtgactattcgctccacgtggacatcacgagctggtatgatggcgttcgggaggagctggaggtgctagtgcaggacaaaggtgtcaactccttccaagtctatatggcatataaggacctgtaccagatgtctgacagccagctgtacgaagccttcaccttccttaagggtctgggagctgtgatcttagtccatgcggaaaatggagatttgatagctcaggaacaaaaacggatcctggagatgggcatcacaggtcctgagggacatgctctgagtagacctgaggagctggaggccgaggccgtgttccgggctattgccattgcaggccggatcaattgccctgtgtacatcaccaaggtcatgagcaagagtgcggcggacatcatcgcactggccaggaagaaaggccctcttgtcttcggtgagcccatagccgccagcttgggaacagatggcacccactactggagcaagaactgggccaaggcagctgcatttgtgacttcccctcccctgagcccagaccccaccactcctgactacttgacttccttgctggcctgtggagacttgcaggtcacaggtagtggccactgtccctacagtactgctcagaaggctgtgggcaaggacaacttcactctgatccccgagggcgtcaatggcatagaagagcggatgacagttgtctgggacaaggcagtggctactggcaagatggatgagaatcagtttgtagccgtcaccagcaccaacgcagccaagatcttcaacctgtacccaaggaaaggtcggattgctgtgggctccgatgctgatgtcgtcatctgggacccagataagatgaagaccttaacagccaaaagccataaatcaactgtggagtacaacatcttcgagggcatggagtgccatggctcccccctggtggtcatcagccagggcaagattgtctttgaggatgggaacatcagcgtcagcaagggcatgggccgcttcatccctcggaaaccattcccagagcacctctaccagcgtgtcaggatcaggagcaaggttttcgggttgcatagtgtctcaaggggcatgtacgatggccccgtgtacgaggtgccagctactcccaagcatgcagctcctgctccttctgccaagtcctcgccttctaaacaccagcccccgcccatcaggaacctccaccagtccaacttcagcttgtcaggtgcccagatagatgacaacaatccaaggcgtacagggcaccgcatcgtggcgccccctggtggccgctccaacatcaccagcctcggttgacctcagatgagccagatatgcaagagtgaaggattatgggaaaacgtccattccttttcctgtccgtgtttttgaagcccacagttttagttggtactgatggaggggagattgagtgatgctctttccttctctgtttaggaagaagtggtactagtgtggtgtgtttgcctggaagttccttgcccacagtgtgtgttaacaccgactccacctcagagcatggtgtctccattttcccttcctagtgaccccccaggtttagcatcgtcctatactgttccctccactcctccacgaccctctgagtgatggttcctttccaccctgtagctgttctaggataggatgcatgttagtaagttacgtacgcaagtctgagcgcggctgatgaacatcgtcgaggacgacatagacacgatgccaagaccttagctcccaggggagatgtccaaacttaaaaatgaaggcgccccatgagtcttcactagaaagatgtggtccccatccctaccctgactgagacctgtgaaaatgcagaatgacaggaaaggtcaccacccacgtcctgtgtcaacaacccggtccctgtggcacctgtaactggccatagtgtctctctggtctgtgtgtccttccagccagccttgggcttgggcccagccaggcttacacccagaaaggggtgtcctgacaccccactcaggccttgaggatggtgcggtaatggctttgcccaggctgcctgagtctctgtccctctgaggaggtcagcaaggcagtcagatttttaaagttttgtacagttttcctttgtattcacttccatttttacttaataattgacttgttggtggctcttatttctgaattcaaagcttgtgaaaaaaaataaagaaattaaattgcccgttg

SEQ ID NO: 4139 - DNA, 2083 bp, Rattus norvegicus
  Genbank Accession No. U52948
ggttgcaaagaaatgcttctcaggactccagggctgcctaggaggagcggcatggcctcaggcgtgaccatcaccctagccattgcaatctttgccttggagatcaatgcacaggccccagagcccactccccgggaagagccatcagcagacgccctcctaccaatagactgcagaatgagcacatggagtcagtggtcacagtgtgatccttgcctcaaacaaaggtttcgctcaagaagcatggaagtctttggacagtttcagggaaaaagctgtgctgatgctttgggagacagacaacattgtgaacccactcaggagtgtgaagaggtacaggaaaactgtgggaatgactttcagtgtgaaacaggcaggtgcataaagaggaaacttctgtgtaatggtgacaacgactgtggagatttttctgatgagagtgactgtgaaagtgacccgcgcctcccgtgccgtgaccgggtggtagaagaatcggaactgggacgaacagcaggatatgggatcaacatcttagggatggatcccctgggcacgccttttgacaatgagttctacaatggactctgtgaccgggtacgggacggaaacactttgacatactatcgcaaaccttggaacgtagcatttctggcctatgaaaccaaggctgacaaaaatttcagaactgagaattatgaagaacagtttgaaatgttcaaaaccatcgtccgagacaggaccacgagttttaatgctaatttagctctaaaattcacaatcactgaagcacctataaaaaaagttggagttgatgaagtcagcccagaaaaaaactcttcaaagcctaaagactcttctgttgattttcaattttcatatttcaagaaagaaaattttcaacgattgtcatcctacttgtcacagacgaaaaagatgtttctgcacgtgagaggaatgattcaactggggagatttgtcatgaggaatcggggcgttatgctgacgacaactttcctggatgatgtaaaggctttaccagtttcctatgaaaagggcgaatattttgggtttttggagacttatgggactcactacagtagctctgggtccctgggagggctctacgaactgatctatgtcttggataaagcttccatgaaagagaaaggtgttgaactcagcgacgtaaagcggtgtcttgggtttaacctggatgtttctctatatacgcctctacaaactgccttagaaggaccatcattgacagccaatgttaatcacagtgattgcttaaagacaggggatggtaaagtagtaaacatcagccgcgatcacatcatagatgatgttatttcattcataagaggagggaccaggaagcaagcagttctcctgaaagagaagcttctcagaggagccaagacgattgatgtgaacgacttcatcaactgggcctcatccttggatgacgctccagctctcattagtcaaaaactgtcccctatctataatctcattcctttgacaatgaaagatgcatacgcaaagaaacagaatatggaaaaggctattgaagactatgttaatgaattcagtgctagaaagtgctacccatgtcaaaacggaggcacagcaattcttctggatggacagtgcatgtgctcctgcacaatcaagtttaaggggattgcctgcgaaatcagtaaacaaagatagccttcaggaaacaaagcaaaacctggttcacatggaaggtggaaaaaaggacaaaaaaagaagaagagagaggagagagaagagagagagaaaagaaaaaaccccaggactttccaacttagcatcctaccctagagcgaatcctcactgccaagtagaaagcagcttgcttcatggaaatcctaccaacctctgatgtcgtctctgtttcaggtctacagtgcctttctcccctctttaatgcctataatgcttccatttttttttttatccctaatgaagaatcggcagtgagatatgccaggactgccttttcccacaggcaatgccaatctctcgctaataaaacagagttaaattaaaaaca

SEQ ID NO: 4140 - DNA, 2006 bp, Rattus norvegicus
  Genbank Accession No. U53184
gcgcgcgcggccagcgagacctcccggctccactggcggcgcgggcggcggtaaaatgtcggctccaggaccttaccaagcagctgcaggcccttctgtaatgcctactgcacccccaacctatgaagaaacagtgggtgtcaacagttactacccaacgcccccagcacctcagccgggaccagccacagggctcattacgggcccggatgggaagggcatgaatccaccttcgtactacacccagcccgtgcctgtccccaacgccaacgcaattgcagtgcagacggtttatgtgcagcagcccatctccttctacgaccgccccatccagatgtgctgtccttcctgcaacaagatgatcgtgacccagttgtcctacaatgcaggagccctcacctggctctcctgtggcagtctgtgtctgctgggatgcgtcgctggctgctgcttcattccgttttgcgtggacgccctgcaggatgtggaccattactgccccaactgcaaagcgctcctgggcacctacaaacgtttgtaggactcggccagccacaggggaggtagacaagtgctcccggaagtcacccaacccttgcccagcgcagccagaagacgtcccttccttgatctcttcatgagctcgtcttcgtgtcttttagggggtggggaaagtcggaaaagtaacaaacccccaaacccagaaactgctgctggagttgtgccctgcacatgcaaagacgtggaccttgggtgttgctttaagggtttaccgcctgatctcgttaccccactaactgtgattgttactccatttgcatctcgtctgctgatttgccactgcctgccccctcttcctcaagaagaggccttcctggtgccaggctcaaaacccgaagctacagtttgccttatttttcactgtttggcttgatctgtaccatctctcccagccctaatgacagagaccttgccttaaagactttgcggttctgtaattgcagacttctccagcactcagaatcactttcaattccatagagttgttcctctccacacacacccctcccccggtgcacagaagggctgccgacacccaccagactcatacagagaaggtcacaagtactaaatgaaaggctcccagcccaccttgtctcagcccctgtcctgtgaagggactccttcctcacacagtttctgtgacttccttttgttcttaaacacatggaagttacttggcagggagacatttctagaataatttttgtgatcacgatacacccttcattctccgtttgctggtatgtttttagttggtttggttttagttttccacatacagtctagctcgtggccagccttgagctccgaggagatcctccatcttctcctctcaaatacccagggcccagacatttgcctctgcacctgctgggctttttctctcatttttccttaaccagaaaaacaaacgggtaatttcatcgactgcctatgtaggtttggtgtggttttgaaaaccttgtttccatggggccctttgggggagtcagggggcccctgcacgagcccatgcttcaatgccgagagattggctgctggaaccccctgaagcatgatttcatgttttagagatgagcttctgtggtacggtcatcatggtctccaacatcaacagacaaggtagaaggatgtcaacgacaaagataagttcagggctctttctagggtcaccactctgtcctgtgtaacactgacacagtctggccagcctttcaggaggtcctggctccctcctaaacccatgtaggwcttgctgcaagtaacagtgtatgaagtcaacctgacctggaacagaagtctgcatattggttaagatacagcctatgtatcttcatacaacgatccagaagtactagacatcatttttgcagtgaattatgggtaccatacatgactttgatgatatctgcttttaaacaaataaaatctttgatcactca

SEQ ID NO: 4141 - DNA, 1330 bp, Rattus norvegicus
  Genbank Accession No. U53859
gaattcgttcttgaagggcggcggtggcggtgggggaggcgggggtctgggcgggggcctgggcaatgtgctcggaggcctgatcagcggagctgctggaggcggcggcggtggaggcggcggtggcggcatgggactgggaggaggtggcggaggcggtggaacagccatgcgtatcctgggcggagtcattagcgccatcagcgaggctgctgcgcagtacaacccggagcccccgcccccacgtagccattactctaatattgaggccaacgagagtgaagaggaacgtcagttcaggaaactttttgtccagctggctggagacgacatggaggtcagcgctacagaactcatgaatatcctcaacaaggtcgtgacccgacacccagatctgaaaactgatgggttcggcattgacacttgtcggagcatggtggctgttatggatagtgacaccacaggcaagctgggctttgaggagttcaagtacctctggaacaacattaaaaagtggcagggtatatacaaacgctttgatactgaccgatcagggaccattggtagcaatgaactcccaggggcctttgaggcagcaggattccacctgaatcagcatatctacagcatgatcatccgccgctactcggacgagaccgggaacatggatttcgataacttcatcagctgcttggtcaggctggatgccatgttccgtgctttcagatctcttgacaaaaatggcactggacagatccaagtgaacatccaggagtggttgcagctgactatgtattcctgagtggaagtcacagacctgccgcctcactgctcactgtggagccttgaacctgatcctgtctgcagccacgtttttacggtcatgtcctgctacccagaggccttccttttccctatgctggtacccagcttcccagtcggcagccagagctcaacgtgccccagcttgctgcaccctgagttcccctggctctgagacaagctagcttgctctgccgaagtgtcacccctacccccagtcacacccagtccgcaccctctgtgacctccatcctgtctgtgtgccaagcctagcactcctattgcttccatgtcccaagggccctgtctcagttctgggaggatcacgcctgtccctacacaccttgttacacactcacacagttacctcccaggcagccaaataaactccaggccatccagtgccacacaccctagtgcctatgcctgcactgttttccccctgcacagctgtcgggcccaagaggaaataaactctccattcgctgcttaaaaaaaaaaaaaaaaa

SEQ ID NO: 4142 - DNA, 1728 bp, Rattus norvegicus
  Genbank Accession No. U53873
aatctagcaaaatcaatccataatctctatttatttgttgaaaatgttgatcttaaccaaatcagtagtagtggtgcgtcttggatccaaaatgtggataccaaatatcaaatcagaatccagatacaagaaaaactccagcatctcagaacacagattcataatatagacattcaacagcttgctgcagagttaaaacaacagattgaagctcttgatgtcccaatgcatttagatcaactgagaactgcaattctattccaaagaataagtgtcattattgagcgtgtcaaatactttgttatgaatcttattgaagattttaaagtaactgagaaaatcaatacttttagagttatagtccgtgagttaattgagaaatatgaagtagaccgacaaatccaggttttaatggataaatcaatagagttggcccacagatacagcctgagtgagcctcttcagaaactaagtaatgtgctacagcaaattgagataaaagactactatgataaattggttggttttattgatgacactgtcgagtggattaaagcagtgtctttcaaaaatatcattgaagaactgaatagattgattgacatgtcggtaaaaaagttgaaagcctttgattatcaccagtttgtagacaaaaccaacagcaaaatccgtgagatgactcagagaatcaatgctgaaatccaagctctcgaactcccacagaaaactgaagcattaaaactgtgggtagaagacttcaaaaccacggtctccaactccctggaaaaactcaaggacaccaaagtaactgtggtcgttgattggctgcaggatggtttggctcaaataaaagcccaattccaagatgctttagaagatgtacgagaccgaatttatcaaatggacattcagggggaactggagcgctgcttgtctctggtaagccaagtttacagcacagtggtcacctacatttctgactggtggactctgactgctaaaaacataacagactttgcagagcaatattccacccaaaagtgggctgagagtgtgaaagcactggtggaacaaggattcattgttcctgaaatccaaacatttctggggaccatgcctgcatttgaggtcagtctccacgctctccaagaagctaactttcagactcctgactttatagtccccttgacagatttgaggattccatcaatttggataaacttcaaaatgttaaagaatgtaaaaatcccattgagattttccactccagaattcactctcctcaacaccttccgtgtccgttcctttacaattacgttgctggaaataaaagcaaagatcattcgaactatcgaccaaatgctgagcagtgagctacagtggcctcttccagaagtgtatttgagagccctggagatggtgaacatttctcttgcaagactctctctgccagacttccatgtaccagaaatcacaattccagaattcacaatcccaaatgtcaatctcaaagatttacaggttcctgatcttcacataccagaattccagcttcctcacctctcatgcacaactgaaatacctgctttcggcaaactacatagcgtcctgaaaatccaatctcccctctttatattagatgctagtgccaacatacagaacataactacttcagagaacaaagcagagattgtggcttctgtcactgccagaggagagtccaaattt

SEQ ID NO: 4143 - DNA, 787 bp, Rattus norvegicus
  Genbank Accession No. U53927
tggtccttctctttgtcatggtggctgggtttgtgaaaggaaatgtggctaactggaagatcagtgaagaatttctcaagaatatatcagcaagtgccagagaaccaccttctgaaaatggaacaagcatctacggggctggcggcttcatgccttatggctttacagggacgctggctggtgctgcaacgtgcttttatgcctttgtgggctttgactgcattgcaacaaccggcgaagaggtccggaatccccaaaaggctattcccattggaatagtaacttccttacttgtttgctttatggcctattttggggtttctgcagctttaacacttatgatgccttactacctcctggatgagaaaagcccactccctgttgcatttgaatatgtcggatggggtcctgctaaatacgttgtcgccgcaggctccctctgcgccttatcaacaagtcttcttggatccattttcccaatgcctcgtgtaatctatgctatggcggaggatgggttgcttttcaaatgtctagctcaaatcaattccaaaacgaagacaccaataattgctactttgtcatcgggtgcagtggcagctgtgatggcctttctttttgacctgaaggctctcgtggacatgatgtctattggcaccctcatggcctactctctggtcgcagcctgtgtgctcattctcaggtaccaacctggcttgtgttatgagcagcccaaatacacccctgagaaagacattctggagtcatgtaccaatgcgacctcgaagag

SEQ ID NO: 4144 - DNA, 1511 bp, Rattus norvegicus
  Genbank Accession No. U55765
gatgaagggaagtggcccctggcctccacagctgaccacatgagggtggtttctagcctctttcttcctgtgctccttgcagaggtgtggctggtgagcagtttcaatctcagctcccatacaccagaggctcccattcgcctggtgtctcaggattacgagaatcaaacttgggaagagtacgaatgggctgatcccagggatgataatgaatactggctaagggccagccagcaactctccaatgagacttcaagctttgggttcagcctgcttcgaaagatctccatgaggcacgatggcaatgtgatcttctcaccatttggcctgtctgtggctatggtgaacttgatgctgggggccaagggagagaccaaagtgcaggtagaaaatgggctcaacctacaggccctgagccaggcaggacccctgatccttccagccctcttcaagagagtcaaagagaccttttccagcaacaagaaattgggcctcacccagggtagctttgccttcatccacaaggactttgaaattaaaaagacctatttcaatctatccacaatgtattttgatacagagtacgtgcctacaaattttcgaaattcttcacaagccagagggctcatgaaccattacattaacaaagagactgaggggaaaatccccaagctttttgatgagattaatcctgaaacaaagttaattctggtggactacatcttgttcaaaggcaagtggctgactccatttgaccccatcttcactgaggctgacactttccacctggacaaatacaaggcagttaaggtgcccatgatgtaccgggaagggaactttgcctctacctttgataagaagttccgttgtcacatcctcaaactgccctaccaaggaaatgccaccatgctagtggtccttatggagaaatcgggtgaccacttggccctggaggactacttgaccacagacctcgtggagatgtggctccaggatatgaaaaccagaaaaatggaggtcttctttcccaagttcaagctgaaccagaggtatgagatgcatgagctgctcaagcaggtgggaattaggaggatcttctccacctcagctgacctcagcgaactctcagccgtggcacgaaatcttcaggtgtccaaggtcgtacaacagtcagtgcttgaggtggatgaaaggggaactgaggtggtgtcagggacggtgtcagagatcaccgcttactgcatgcctcctgtcatcaaagtggaccggccttttcacttcatcatctacgaggagatgtcccggatgctcctatttcttggcagggtggtgaacccgacagttctgtgactcgggcatgtaggacctcggccaccacaggtgctgagccagaggtgtctgaatcacaagacgctgttggtagacggtaaaggatgcattctctgtacccagccagtttgctatggctgttgtctgattaacactgaaattaaaatgactcatactttaaa

SEQ ID NO: 4145 - DNA, 1426 bp, Rattus norvegicus
  Genbank Accession No. U55938
ggcgctcaatggaccgatttccccggtttccctgaacccagcctagcccggaatgagaaattgcaaaatggcccgagtcgccagtatactagggctggtcatgctcagcgtggccctgctgattttatcgcttatcagctacgtgtccctgaaaaaggagaacatcttcaccactcccaagtacgccagcccgggggcgccccgaatgtacatgttccacgcgggattccggtcacagtttgcactgaagtttctagaaccgtcatttgtgcccattacgaattttctcacccatgaactccaagagaaaccttctaaatggacatttaatcggacagcgtttttacatcaaaggcaagaaattcttcagcatgtcgatgtaataaaaaatttttctttaaccaagaatagtgttcggatcggacaactgatacattacgattattccagccataaatatgttttctctattagcaataacttccggtccctgctcccagatgtgtcgcccattctgaataagcgttataacatttgtgctgtggtcggaaacagtggaatcttgacagggagtcagtgtggacaagaaatagataaatcggattttgtttttcggtgcaattttgccccgacagaggctttccacaaagatgttggaaagaaaaccaacctcacaactttcaatcctagcatcttggaaaaatattacaacaaccttttaaccatccaggaccgtaacaacttcttcctcagtttaaaaaagctcgacggggccattctctggatccccgcatttttcttccacacttctgcgactgtaaccagaaccttagtggattttttcgttgagcacagaggtcagttaaaggtccagttggcttggcctggaaatatcatgcaacatgtcaacaggtactggaaaaacaaacacttgtcacccaaacgactgagcacaggtttcctaatgtacacccttgcatctgcaatatgtgaagagatccacttgtacggtttctggcctttcggatttgaccccaacaccagggaggatctgccctaccactactatgacaaaaaaggaaccaaatttaccaccaagtggcaggagtctcaccagctgcctgctgagtttcagctgctctatcgaatgcatggggaagggctcacaaagctcactctgtcacactgtgcctaagaactccaaatggaaagtgccaaatggctgtttaaaaagtgcccccaaaccaaattgaatagtctccagaacagaacccatagacaatctggcaaagcctgtctgccacttacaaggaaagatatcttctcttcctcttttgcactgctctttgaatggtccgaacagacttaggacaggtgcattgaagccgtttcttttagacttgactgggaaaaggttatattgcat

SEQ ID NO: 4146 - DNA, 3003 bp, Rattus norvegicus
  Genbank Accession No. U57391
gcgcccgccccgagagggtagcagatagtccctcggagtctccgccccaggggcatgtggagggtgtccaccgattaggatcgggtccgagtgattgaccacggggcccggagggtccgaacctggagcgcagcctgcaccctccaccacccgcccttctggaatgtcagaactaagccaagaggcaggtgcaccggaaaattgtgactgagccttcttggcagaagagaaactgagtcaccagtccaggaaccgcagggctgttggcgctcacctcgagtcttctggctgctttcctatttgctccctgcaggctccccctgtcctcctcctggggcacatcatgaatggtgccccttccccagaggatggggttttcccttctccaccagcgctgccaccaccccctcccccaagttggcaagagttctgtgagtcccatgcgagggctgctgccctggatcttgctcgccgttttcgcctctatctggcctcccacccacaatatgcagagccgggagcagaggctgccttttctggccgttttgctgagctcttcctgcagcacttcgaagctgaggtggctcgggcctcgggctcactctccccacctgtcttggctccattgagccctggtgtggaaatcccaccatcacatgacctgtcccttgagagctgcagggtgggtgggcccctggcagtgttgggcccttctcgatcttctgaggacctggctggaccccttccttcctcagtctcttcctctacaacgtcctcaaagccgaagctcaagaaacgcttctccctccgctcggtgggtcgttcagtcagaggttctgtccgaggcatcctgcagtggcggggggctgttgaatctccctcccaagctgggcctctggagaccacatcaggtcctccagttctaggtggaaacagcaactccaactcctctggtggtgctgggacagttggtagggcattggccaacgatggcacatcccctggggagagatggactcatcgctttgagaggctaaggctaagtcgtggagggggaaccttgagagacggagcaggagtgatacagagagaagagctgctgagtttcatgggggctgaagaggctgcccctgacccagcaggagtaggtcgtggaggaggggcagctgggctgacctcgggaggaggagggcagcctcagtggcagaaatgtcgattactgctccggagtgaaggagaaggaggaggaggaagtcgcttggagttctttgtaccacccaaggcatcccggccccgtcttagcattccctgttctactattactgatgtccgcacagccacagccctggagatgcctgacagggagaacacgtttgtggttaaggtagaaggcccttcagagtacatcctggagacaactgatgcacttcatgtgaaggcctgggtgtctgacatccaagagtgcctaagcccaggaccctgccctgctatcagcccccgtcccatgacccttcccctggcccctgggacctccttcctcacaaaggataacacagagagcctggagttgccctgcctgaatcattcagagagtctgcctagccaggatcttcttctgggacccagcgagagtaacgaccgcctgtcgcagggagcttatggaggcctctcagaccggccgtcagcgtccttctcccctagttctgcctccattgctgcttcccattttgactcaatggaactgcttcctccagagttgccccctcggattcccattgaggaggggcctccagcagggacagttcatcccctctctaccccgtaccctcccctggatactcctgaagcagccacagggtcattcctctttcaaggggaggcagaggggggtgagggggaccagcccctctcaggctacccttggttccacggcatgctctctcggctcaaagctgcccagttagtgttagaaggaggtaccagctcccatggtgtcttcttggtacgccagagtgagacaagacgtggtgaatatgtcctcactttcaacttccagggcaaggctaagcacctgcgtttgtcactaaatgaggagggtcagtgccgggtccaacatctgtggttccagtccattttcgatatgcttgagcacttccgggtgcaccccatccctctggagtctggaggctccagtgatgttgtccttgtcagctatgtgccctcccagcggcagcaggaacggagcacctcccgtgatccaacccagccctctgaaccccctccatggacagatcccccacatcctggggcagaagaggcgtcgggggcgccagaagtggcggcagccacagccgcagcagccaaagagaggcaagagaaggagaaagcgggcggcggaggggtccaggaagagctggtccccatggctgagctggtccccatggctgaattggaagaggccatagcaccaggcactgaggctcagggtggtgctggctctagtggggacttggaggtgtccctaatggttcagctccagcagttaccactagggggcaacggagaagaagggggtcacccccgagccattaataaccagtactcatttgtctgagatacctgcccaccctccattttcctgctcccagccttaagttgtgagactgggctgggtaaggacacagaggaaagtgggagtcccctccctacatgcttcctgacccttgtcagccaagggtgtgtatgttggtacaagtagaggttcaagagcccagttaagtccccagttactacactacaggtgcccttgccccgaggccaaggacttgggctccattacctccctgaggggctcttatggtcagccccatccctgggggctgtttcccccactaataacccccaacccaagcaagggtgagggggaagggctgtcagttatattaaggttgttgttgttgttttaaaccaaatggaaaagcataaataaataaagggtttatc

SEQ ID NO: 4147 - DNA, 1780 bp, Rattus norvegicus
  Genbank Accession No. U57715
cgcgcgggcaggtctatggggagggacgaggagtcccactctctctgcggcaacggttggctgagaaagggtcatgacgtcacacagggccctcgaagagggcaggtgagtggctagagtagtgagcaccaaacagcagtgacgttgggttcagaccccgcccctttccttggagcgcggagactcgctacggaagcttcggccaatcagaaggaagacccaaggatgatatggtgatggcatgcagccagaggtaaaatgacaaggtgacttattcgacatgtcaaaatcttgtttccagagctctctgactgctctcacgtactcaaaaatagtggggacagagccgacctggggaggcttggcttcaagagacgctagattataaagaaagccaggagtcccggtcgccaaaatggggaggagccagtgaagaaacgggcccagtttcctctttaagacccaccccagagcgctggccccgcctcacgccgttgctgctgcgacccgcccccttccactcgcccccgggctgggctggggctcccggttccgcgcccctggctacgggggtacggccccctagccaccactacttggggccttctgctcaagatccctccaggcactgcggatggaggcgtgggggagccttggaacctcagactagttttgaatccctgccctgccagtcactagcttgtggctttgagtctgacaagatgtaccaggtcccattgacactggaccgggatgggaccctagtccggctccgcttcactatggtggccctgatcacggtctgctgtccacttgtcgccttcttcttctgcatcctgtggtccctgctcttccacttcaaggagacaacatctacacactgtggggtgcccaattacctgccatcagtgagctctgccattggtggggaggttccccagcgctacgtgtggcgtttctgcattggcctgcactcggcaccccgcttcttgacagccttcgcctattggaaccactacctcagctgtgcatccccgtgcccgggttaccgccttctctgccgcctcaacttcagtctcaatgtggtggagaacctggcactgctcgtgctcacctatgtctcctcctccgaggacttcaccatccatgaaaatgctttcattgtgtttatcgcggcctccctcagttacatgctcctcacctgcattctctggcggctgaccaagaagcacacagatcgcaagtcctacagctggaaacaacggctcttcatcatcaacttcatctccttcttctcggcgctggctgtttacttccggcacaacatgtattgtgaggctggagtgtacaccatctttgccatcctggagtacactgtggtcctaaccaacatggcgttccacatgacagcctggtgggacttcgggaacaaagagctgctaataacctctcagcctgggaaaagagattctaaaccccgtctctgatcctggaaaacaagaaaccactctggccttccctatctcagtgtcctctctgggcccttctccgtctggggactgggagagaagagcaggaagggtaggacaaggctgaccccagcactgctgacttctccccccctctcatctctcatgggggtcttcaagaagcatcactactcactgaaaggtcctaaaaagctgagctggcaggaaagccctaccacttggtgctaagaaaaaaaaaaaaaaaaaaaaaaaaaaaaaaaaaaaaaaaaaaaaaaaaaaaaaaaaaaaaa

SEQ ID NO: 4148 - DNA, 3177 bp, Rattus norvegicus
  Genbank Accession No. U58858
gctgccttggccagagtccggagcagccgccgcccgagcgccccgagctcagttcgctgcctgcgccggctgtctcccggccagacccgaccccgacccggctcggcccggctccacgctcaggtacaccggatagggccacgatggaggtgatgaaccttattgaacagcccatcaaggtgacggagtggcagcagacgtacacctatgactcgggcatccactccggtgtcaatacctgtgtgccctctgtcagcagcaagggcctcctcgatgaggatgacacctgcggcagacagtacacactcaagaaaactaccacctacacacaaggggtgccacagagccaaggcgacctggagtaccagatgtccaccacggccagagccaagcgggtgcgggaggccatgtgcccaggtgtctcaggcgaggacagttctctcctcctggccacccaggtggaggggcagacgaccaacctgcagcgactggccgaaccatcccagctactcaagtcggccattgtacatctcatcaactaccaggacgacgcagagctggccacccgggctctgcctgagctcaccaagctgctcaacgatgaggacccggtagtggtcaccaaggcggctatgatcgtgaaccagctgtccaagaaggaggcatcccgccgtgccctgatgggctcgccccagctggtggcggctgtggtgcggaccatgcagaacaccagtgacctggatactgcccgctgtaccaccagcatcctgcacaacctctcccaccaccgagaggggctgcttgctatcttcaagtctggaggcatccccgccctggtccgaatgctcagttcccccgtagagtctgtcctgttctacgccatcaccacactgcacaacctgctgctctaccaggagggcgccaagatggcggtgcgtctggcagacggactgcagaagatggtgcccctacttaacaagaacaaccccaaattcctggccatcaccaccgactgcctgcagctcctggcctatggcaaccaggagagcaagctgatcatcctggccaatgggggaccccagggtcttgtgcagatcatgaggaactacagctacgagaagcttctgtggaccaccagccgggtgctcaaggtgctctccgtgtgccccagcaacaagcctgccatcgtggaggctggtgggatgcaggctctaggcaagcacttgacaagcaacagcccccgcctggtgcagaactgcctgtggactctgcgcaatctctcggatgtggccaccaagcaggagggcctggagaacgtgctgaagatcctggtcaatcagctgagcgtggatgatgtcaacgtcctcacctgtgccacgggccacctctccaacctgacctgcaacaacagcaaaaacaagacgctggtgacgcagaacagtggcgtggaggcgctcatccacgccatcctcagagccggagacaaggacgacatcacagagcccgccgtttgcgccctgccgcaccttaccagccgccaccctgaggctgagatggcccagaactctgtgcgcctcaactatggaatcccggccattgtgaaactgctcaaccagccgaaccagtggccactggtcaaggcaactatcggcctgatccggaacctggctctgtgccccgccaatcatgccccgctgcaggaggccgcggtcattccccgcctcgttcagctgctggtcaaggcccaccaggatgcccagcgacatgtagctgcgggcacccagcagccctacacggatggtgtgaggatggaggagatcgtggagggctgcaccggagccctgcacatcctcgcccgagatcccatgaaccgcatggagatcttccggctcaacaccattcccctgtttgtccagctcctgtattcctctgtggagaacatccagcgtgtggctgccggagtgctgtgcgagctggcccaggacaaggaggctgccgatgccatagacgcggagggcgcctctgcccctctcatggaactgctccactcccgcaatgaggggaccgcgacctacgctgctgctgtcctgttccgcatctccgaggacaagaacccagattaccgtaagcgagtgtctgtggaactcaccaactcgctcttcaagcatgacccagctgcctgggaggctgcccagagcatgatcccgatcaacgaaccctatgcagacgacatggatgcaacctaccgccccatgtactccagcgatgtgcctctggaccccctggatatgcacatggacatggatggcgactaccccatggacacctacagcgacggcctgagacctccctaccccgctgcagaccacatgctggcctagctggctccacctcactcagagctgtttctcacctggaaagctctccagagcagactgtgggacgagacagtacctaagccccgggagccagcctggacttcctgctgcacacgcgctccagagagttcctccgtagggattttgggatggtgtctctcccgcttttctgtcctgggctggggatccaggctcagtactttctccccctccccactatggctatgaccactaaagctttagactcggcctgtgtccctgtacagcagccctctctgctgactccagctgcctggacccccagggcttcctttgtttttccggggccagttttctcaatgaactaaagcatccaactgccctgacctcctgggatatccaagacacaggttcaaggcccaaacccttcacatccaaagcttcttttgaaaagttcagggaccttcttgggggtagcgggagagagtggagactttttaagtgcccctgctaggacctgcccttctcttcaggatgctaagtctgccttgcccctcccaagggtgaagctccctctcacactgctccacactggcccatctgacctgcagaagtgctctagctcacccctctggtgtgtggtgaggggctttcttctcccactcctttttgactcccaccacctcctgcacatgggtttggggaggactgaaatggaagtcccctcagagagtcttattatcaacactttatgttttggttattggtttttctttcctttttgtttttgtatagaccaaagcaaagaaaataaaataac

SEQ ID NO: 4149 - DNA, 432 bp, Rattus norvegicus
  Genbank Accession No. U59184
gagatgcagaggatgattgctgatgtggatacagactccccccgagaggtcttcttccgtgtggcagctgacatgtttgcagacggcaacttcaactggggccgggtggttgcccttttctactttgctagcaaactggtgctcaaggccctgtacactaaagtgcccgagctgatcagaaccatcatgggctggacactggacttcctccgggagcggctgcttgtctggatccaagaccagggtggctgggatggcctcctttcctacttcgggacccccacatggcagacagtgaccatctttgtggctggagtcctcactgcctcactcaccatctggaagaagatgggctgaggcttcctgctgccttggactgtgtcttttcttcataaattatgacatttttcctgggatgaatgggtaacgaga

SEQ ID NO: 4150 - DNA, 5896 bp, Rattus norvegicus
  Genbank Accession No. U60096
cgttgctgtcgggtgcagcgcgcaggaatgcagcccgcctgactcaccagcgcctccttcctacctgcgccgcccgtccataaagcactgctggtcccgcccgccgccgcccgacaagctgtccggccgggctcgcccgcgcactcagctcgacccaacgcagcccaagtccgaggtagtcccactcaggaggaggaagaggaggatggcagggctatgttccagcccgtgggtgaagctgctactggcagtagtgctgagtgccggtctccctggaaacatggccaaccgctgtaagaaggctcaggtgaagagctgtacggagtgcatccgagtggacaagagctgtgcctactgcacagacgagctgttcaaggagcgacgctgcaacacccaggcggacgttctggctgcaggctgccggggagagagcgtgttggtcatggagagcagccttgagatcacagagaacatccagattgacaccagcctgcaccgcagccaggtatctccccaaggcctgcaagtgcggctgcggccgggtgaggagcgcaactttgtgttcaaggtgtttgagcccctggagagccccgtggatctgtatatcctcatggacttttccaactccatgtctgatgatctggacaacctcaagcagatggggcagaacctggccaagatcctgcgccagctcaccagtgactacactattggattcggaaagtttgtggacaaagtcagtgtccctcagacggacatgaggcccgagaagctgaaggagccgtggcccaacagcgaccccccattctccttcaagaatgttatcagcttaacagagaatgtggaagaattctgggacaaactgcaaggagaacgcatctcaggcaacctggacgctcctgaaggaggcttcgacgccatcctgcagacagccgtgtgcacaagggacattggctggagagcggacagcacccacctgctggtgttctccaccgagtctgccttccactatgaggctgatggtgccaacgtgctggccggcatcatgaaccgcaatgatgagaagtgccacctggatgccacaggcgcctacacccagtataagacccaggactacccatctgtgcccacactggttcgcctgcttgccaaacacaacattatccccatctttgccgtcaccaactactcttacagttactacgagaagctccataaatatttccctgtctcctctctgggagtcctgcaggaagattcatccaacatcgtggagctgctggaggaggctttctatcgaattcgctccaacctggacatccgggctctggacagcccgagaggcctgaggacagaggtcacctccgataccctccagaagacagagactgggtcctttcacatcaagcggggggaagtgggcacatacaatgtgcatcttcgggcagtggaggacatagatgggacacacgtgtgccagctggccaaagaagaccaaagaggtaacatccacctgaaaccctccttctccgatggcctccggatggacgcgagcgtcatctgtgacatgtgcgcctgcgagctgcaaaaggaagttcagtcagctcgctgtcactacagaggagacttcatgtgtggacactgtgtgtgcaacgagggctggagtggcaaaacctgcaattgctccacgggttccctgagtgacacgcagccctgcctgcgtgagggtgaggacaaaccatgctcgggccatggcgagtgccagtgcggacgttgtgtgtgctacggtgaaggccgctacgagggtcacttctgcgagtatgacaacttccagtgtccccgcacctctggattcctttgcaatgaccggggacgctgctccatgggagagtgtgtgtgtgagcctggttggaccggccgcagctgtgactgtcccctcagcaatgccacctgtatcgatagcaatgggggcatctgcaatggactaggcttctgtgagtgtggccgttgtcactgcaaccagcggtcttcgctctacacggacaccacctgtgagatcaactactcggcgatacgcctgggcctctgtgaggacctccgctcctgtgtacagtgccaggcctggggcactggggagaagaaagggcgcacgtgtgaggaatgcaactttaaggtcaagatggtagacgagcttaagaaagcggaagaggtggtggagtactgctccttccgggacgaggatgacgactgcacttacagctacaccgtggagggcgacggcagccctgggcccaacagcaccgtcctggtccacaagaagaaagactgcctcccggctccttcttggtggctcattcccctgctcatcttcctcctgttgctcctggtgttgcttctgctgctctgctggaaatactgtgcctgctgcaaagcctgcctgggacttcttccttgctgcaaccaaggtcacatggtgggctttaaggaagatcactatatgctgcgggagaacctgatggcctctgaccacctggacacgcccatgctgagaagtgggaacctcaagggacgagacacagtccgctggaagatcaccaacaatgtgcaacggcctggctttgccacccatgctgccagcatcagccccacagagctcgtaccctatgggctatccctgcgccttggccgcctctgcactgagaacctcatgaagcctggcacccgagagtgtgaccagctacgccaggaggtggaggaaaatctgaatgaggtatacagacaagtcaacggcgtacacaagctccagcagacgaagttccgacagcaacccaacgctgggaaaaagcaagaccacaccattgtggacacagtgttgctggcgccccgctctgccaagcagtcgctgctgaagctgacagagaagcaggtggagcaggggtccttccatgaactcaaggtggcccctggttactacaccctcacagcagagcaggatgcccggggcatggtggagttccaggagggggtagagctggtggacgtgcgtgtgcccctcttcatccggcctgaggatgatgatgagaaacagctgctggtggaggccattgatgtccccgtgggcactgccacccttggtcgacgcctggtaaacatcaccatcattaaggagcaagctagcgggatagtgtcctttgagcagcctgaatactcagtgagtcgtggagaccaggtggcccgcatccctgtcatccggcacatcctggacaacggcaagtcccaggtctcctatagcacacaggataatacagcacatggacaccgggattatgtccctgtggaaggggagctgttgttctaccccggagagacctggaaggaactgcaggtgaagctcctggagctgcaggaagtcgactccctccttcgtggccgccaggtccgacgcttccaagttcaactcagcaaccccaagtttggagcccgcctgggccagcccaacacagccactgttatcatcggggaacaagatgaaacggacagaagtctcataaatgagatatccgcatcgccgccactaccccgtggagacctgggtgccccgcagaaccccaatgccaaggctgccggatccaggaagatccatttcaactggctgccccctcctggcaagccaatggggtatagggtgaaatactgggtccagggcgactctgagtccgaagcccacctgctggacagcaaggtgccctcagtggagctcaccaacctgtatccctattgcgactacgaaatgaaggtgtgcgcctacggggcacacggggaggggccctatagctcactggtgtcctgccgcacccaccaggaagtgcccagtgagccaggaaggctggctttcaatgtagtttcttctacggtgacccagctgagctgggcagaaccagctgaaaccaacggggagatcacagcctatgaggtctgctatggactggtcaacgaggacaaccgacccattggacctatgaagaaggtgcttgtggacaaccccaagaaccggatgctgctcattgagaatcttcgagagtcccagccataccgatacacggtgaaggcgcgaaacggggcaggatggggacccgagagagaggctatcatcaacctggccacacagcccaagcggcccatgtccattcctatcatcccagacatccccatagtggacgcccagggtggagaagactacgaaaacttcctcatgtacagtgacgacgttctgcgctccccagccagcagccagaggcccagcgtttcagatgacactgagcacctggtgaatggccggatggactttgcctatccaggcagtgccaactccctgcataggatgactgctgccaacgtggcctatggcacacatctaagcccacaccagacccaccgaatgctgagcacgtcttctacccttacccgggactaccactctctgacgcgcacagaccactctcagtcaggcacacttccccgggactactccactctcacttccctttcctcccaaggcctccctcctatctgggaagatgggaggagcaggcttccgctgtcctggacccttgggtcctggagccgggctcagatgaagggtgtgcccgcatccaggggctcaccagactctataatcctggccgggcagtcagcagcgccctcctggggtacagattcccgtggggctatgggtgtgcccgacacacccactcggctggtgttctccgccctggggcccacatctctgaaggtgagctggcaggagccacagtgtgatcgagcactgctgggctacagcgtggaataccagctactcaacggcggcgagatgcatcggctcaacatccctaaccctggccaaacctctgtggtggtagaggatctcctgcctaaccactcctatgtgttccgggtacgggcacaaagccaggagggctggggccgggagcgagagggtgtcatcaccatcgagtcccaggtgcacccgcagagccctctctgccccctgccaggctccgccttcaccttgagcacccccagcgccccaggccccctggtgttcactgccctaagcccagactctctgcagctgagctgggagcgcccaagaaggcccaacggagatatccttggctacctggtgacctgtgagatggcccaaggaggaggaccagccagaaccttccgggtggatggggacaaccctgagagccggctgacggttcctggcctcagtgagaacgttccttacaagttcaaggtgcaggcccggacaacagagggctttgggcccgagcgtgagggtatcatcaccatcgagtctcaggatggaggccccttcccacagctgggcagccattctgggcttttccagaacccactgcaaagtgagtacagcactgtcaccagcactcacagcactaccaccaccgagcccttccttatagatggactaaccctggggacccagcgcctggaagcagggggctccctcacccggcatgtgacccaggaatttgtgagccggaccctgaccaccagtggctctctcagcactcatatggaccaacagttcttccaaacctgaatcccccaggaacctgggcccctccttgcctcctcgccctggcgccttcttcctctgctgttgtacccacctgcatgctgatcacagagccagcacctgtagtcagagagcgggggtaggtgctgtctgggaggcatgaagtgggtagaggtgacacaagacctctgactgcatcctgccctgggtccaaacccacatgtaaccaaaaagctggagccgacacaaggacccagcctttgttctgcacttaataaaagactttgctcc

SEQ ID NO: 4151 - DNA, 1619 bp, Rattus norvegicus
  Genbank Accession No. U61729
ccaacacgttcatggtccttgccccgaaccttccagcagcagcctccgccgccgccccgtgacgcctgctccccgtcgtctgccgagccccgcgccatgactgtcgtctccgttccacagcgagatctcgctctgggcggccgctagcgccgttgggttcctcggggccctcccgatggtgagcccggccccgccgcccttgccgcgccttccggacccgcgcgctctgccacccaccctcttcctgccgcacttcctcggaggggacgggccgtgcctcgcccgcgcctcgcaccgctgcaccgtccagctgcagcttggtcccggccgctgccccacggcagcgcccaagaagcggcggaagaaaaaggtgcgggccagcccggccgggcagctcccaagccgcttccaccagtttcagcagcaccggccgagcctggagggtggccgcagcccggtgccggggccgatcgcagcgcaggaggagcggggtccaggggccactgccctgctatacagacagcccccactcgcgaaggaggttttaaaatcaaagatgggaaaatcggagaaaatttcccctccccatagccagcttgtgcatggtatacacttgtgtgaacaaccaaagataagcagacagaaaagcaaatttaacttgccactaaccaagatcacctctgcaaaaaggaatgaaaatgacttttggcaagattccgcttcctctgatagaatgcagaagcaggaaaaaaagcctctgaaaaatactgagaacattaagaataaccatttgaagaaatcagcatttctaacagaagggagccaaaaggaaaattacgccggagccaagttcagcgacccaccgtcccctagtgtcctcccaaagcctccgagtcactggatgggaagtaccactgagaatcccagccagagccgggagctgatggcagtgcacttgaaaacgctcctcaaagtgcagacctaggctccagtctgcagtgtgtattagacacagattcccccccatcctcggactgaaggaagtggatacggcagtggaaatttgccgtatcgcagcatccgacacaatgagcttatgtcacacaagcagcttgtattatattttgtattttgtaaatactgtataccatgtattatgtgtatattgttcatacttgagaggtacattatagttttgttatgaaagtatgtattttccctgcggatgtggtgggtgttttgtatatatacagtggagatattttaagtgggtgctaaggcacgtggaagactgtttatttgcacaggtactgacatttttttaagaacagctgtcaaatctcaaaagtgaagatctaaatgtgaacagtttacctaatgtactactgaagcttaagtctggcacaatcactgtaaacatggagtttgtgtttctctaaattgacttgacttttaatctgtaattactagaaagcttcctatttttaccaaacttgacttctggatatcagtatattgccattattgaaaagatttaaaacacctctaattttaaataccaacaaaattggttgtaatcaaattttaaatcaataataatttggcctcccccccttaaa

SEQ ID NO: 4152 - DNA, 339 bp, Rattus norvegicus
  Genbank Accession No. U64705
cggagaaaatgcatgccagggacttcacagtttctgctctggtaagagttgttggatttagtaatgctaattatagccattaagcaggattttactacaatatggctgctcagtgctgtgttgtcgttccccctgctcagaacaattgtttcttaactatacctgtctgctgtctacctgtagcagccagggacgcttggtctcatacatgatagaaagaaattaaatgaatgcctgacctgaatagggattgctgaattgagttgttgtatttgcagcatggtgacatggaccagaaggaaagagatgtcatcatgagggaattccgatcagggtcaa

SEQ ID NO: 4153 - DNA, 1265 bp, Rattus norvegicus
  Genbank Accession No. U66471
cctgggcgagtgaggacctacaaagtttgtccgctccggggcgccataccagctcggttcccggccggccggctggtccgggcttagccaggagaccccgatggccgcagtgttcctggttacgctctacgaatactcgccgctcttctacatcgcggtggtcttcacctgcttcatcgccaccaccggcctggtattaggatggcttggctgggacgttccagtaattctgagaaactcagaagaaacccagttcagcacaagagctttcaagaaacaaatgagacaagtgaagaatccgttcggcttagagatcactaactcatccgcagcttccctagcaacaggtgtaaccttgacgacagactgcctggaagacagtcgtcttacgtgctactgggggtgcagtgttcaaaagctctatgaagctcttcagaagcacgtttactgcttcaggataagcactccgcaagccttggaagaggcgctgtacagtgactatctccaccgagaacagtattttattaaaaagcacagcaaagaagaaatatattgccaattaccaagcagtactggggttgaagactttggtccagtgcccagatctcgctatccgttggtagctctgttgaccctcgctgatgaggatgacagggaaatttatgacattatttccatggtgtctgtcattcatattcctgataagacttacaaacttccctgcagaatattgtatcaatatttaatcctggctcaaggtcaattttatgatcttaagcaacttttcatgtctgcaaataatagtgctactccctccagagaccagtctcccgcagacgggagtgtggagcacagcttgttggagaaggcggggctggctggggctgaagtggacccggtggaggagagcagcaaagactgtgtggtgtgccagaacgggggtgtgaactgggtgctcctgccttgccggcacgcctgcctgtgcgacagctgtgtgtgctacttcaagcagtgtcccatgtgccgccagtttgtgcaggaatcctttgcactgtgtggtcagaaagaggcagacaaggacatactagaaacttcctgaagaatcacagccggagagtgtactttctacacaagggcagaacctcgtgtccttagagtcaatcctaacagagtctgcagtcttacctgtcggagagagctctgtgtgcactttcatactttgtacagtacatggatgacgggaataaagtcttctgctcagtgcg

SEQ ID NO: 4154 - DNA, 2002 bp, Rattus norvegicus
  Genbank Accession No. U66478
accaaggcgaggccagggccgaggcgcggggacggcggccgagagctaagcgacgtgggacggtgactgggaacggatcggagcgcgggacccggcccgggtctcgtgcgtccccgccgatgggcctccgccgagccggtgctaactgggtcttccctgaagcagaaggaacagtatttcctacctttccgaaccgaagaccaagaagctagagaatctatgtaaataaactgaaatctctgttggctttgcaccccaccccggagccgtcacttttacctggtctgaggagcgtgtagacctcggccagccgctatgaatgtgaccagcttgttttcattcacaagcccagctgtgaagagactccttgggtggaaacagggcgacgaagaagagaaatgggcggagaaggctgtggacgctttggtgaagaaactgaagaagaagaaaggggccatggaagagctggagaaggccctgagctgccccgggcagcccagtaactgtgtcaccattcctcgctccctggatggcaggttgcaggtgtcccaccggaagggactgcctcatgtcatttattgccgcgtgtggcgctggcccgacctccagagccatcatgaactaaagcctctggaatgctgcgagttcccatttggttccaagcagaaggaagtctgcatcaatccctaccactataagcgagtggagagccccgttctcccaccggtgctggttccgaggcacagcgagtacaaccctcagcacagccttctggctcagttccgaaacctgggacaaaatgagccccacatgccactgaatgccacgttccccgactccttccagcagccacacagccacccgtttgcccagtaccccaacagcagctaccccaactctcctggcagcagcagcagcacctaccctcactccccgaccagctcagacccgggcagcccttttcagatgccagccgacacacccccgcctgcttacctgcctcctgaagaccccatggcccaggatggctctcagcctatggacacgaacatgacgaacatgacggcaccgacactgcccgcggagatcaatagaggagatgttcaagcagttgcttacgaggaaccaaaacactggtgctctattgtgtactatgagctcaacaaccgtgtgggcgaacggttccatgcctcctccaccagcgtgttggtggatggtttcaccgatccttccaacaataagaaccgattctgccttgggctgctctccaatgttaaccggaactccactattgaaaataccaggcgacacatcgggaaaggagtccacctttattacgtcggaggagaggtgtatgcggagtgcctcagtgacagcagcatcttcgtgcagagtcgaaactgcaactaccaccatggctttcatcccaccacggtctgcaagatccccagcgggtgcagcttgaaaatcttcaacaaccaagagttcgctcagctactggcgcagtctgtgaaccatgggttcgagacagagtatgaactcaccaaaatgtgcactattcgaatgagcttcgtgaagggctggggagcggagtaccaccggcaggatgtcactagcaccccctgctggattgagatacacctgcatggccctctccagtggctggataaagtccttacccagatgggttcgccccacaaccctatttcgtcggtgtcttaaaggccctcggcttctgtctcttgcaaactattgggccttgcagtacttgaaggacggagaagtcagacaggatggggagctgtaaaggagccgtgatacttgacctctgtgaccaaccgttggatggagaagctgacaggccttggtaacaagctgttgatatcaagaacccgcttagtttacattgtgacattctgttgtaaaatcaactaaaatgctgacttttagcaggactttgtgaatagttagaaaagagatggccaagccaggggcaaattat

SEQ ID NO: 4155 - DNA, 1312 bp, Rattus norvegicus
  Genbank Accession No. U66479
gagtgccagtcatgtcgtccatcctgcccttcacccccccgatcgtgaagcgcctgctgggctggaagaagggcgagcagaacgggcaggaggagaagtggtgcgagaaggcggtcaagagcttggtgaagaagctcaagaagacggggcagttggacgagctggagaaggccatcaccacgcagaacgtgaacaccaagtgcattaccatccccaggtcactggatggccggctgcaggtatcccatcggaaggggctcccccatgtcatctactgccgcttgtggcggtggcccgacctgcacagccaccatgagttacgggccatggagctctgtgagttcgccttcaacatgaagaaggatgaagtgtgtgtaaatccttaccactatcagagagtagagacaccagtgctacctccagtgttggtgccacgccacaccgagatcccggccgagttcccccctctggatgactacagccattccatccccgagaacactaacttccccgctggcattgaaccccagagcaatattccagaaaccccacctcctggctacctgagtgaagatggagaaactagcgaccaccagatgaaccacagcatggacgcaggctctccaaacctctccccgaatccgatgtccccagcacacaataacttggacctacagccagtcacctactgtgagccggccttttggtgctccatctcctactacgagctgaaccagcgagttggggagacattccacgcttcacagccgtccatgacagtagatggcttcactgatccctccaattcagagcgcttctgtctgggcctgctgtccaatgttaaccggaatgcagccgtggagcttacaaggcggcacattgggaggggtgtgcggctctactacattggaggggaggtctttgcagagtgcctcagtgacagtgctattttcgtccagtctcccaactgcaaccagcgctatggctggcaccctgccactgtctgcaagatacccccaggctgcaacctgaagatcttcaacaaccaggaatttgctgccctcctagctcagtctgtcaaccagggctttgaggctgtctaccagttgactcgcatgtgcaccatccgcatgagcttcgtcaaaggctggggagccgagtacaggagacagacagtgaccagcaccccctgctggatcgagctacacctgaatgggcccttgcagtggcttgacaaggtcctcacccagatgggttcccccagcatccgctgttccagcgtgtcttagagacactgggagtaaagggatcg

SEQ ID NO: 4156 - DNA, 1940 bp, Rattus norvegicus
  Genbank Accession No. U67082
ggaattcggcacgaggtgatttccagcttttggaagccccggtgctttacgaaatcacggtagccggagagccatggagatggaacagttgaccttccgagatgtggctgttgacttctctccggatgagtgggaatgcctggaccctcctcagcagaggctgtacagggacgtgatggtagagaactacagaaacctggtctctgtggctctttctcatcattgtacccagaacttttcaccagaacagatcctaaaatattccttcacaaaaggaactaatggaagttgtggccttaaaagtttatacttaagggaagattgtatatatatagatgagagtaaagcccaccatggtagagatatgcaatgtctaattacaagcaataccaaagatgtcattgacagcagagatcaagaacacaaaaccgctctgacaataactcctgtgaggccagatactttggatgagccaagtatctataactgtaaatatccacaggaaagttttcagcatgacttaactttgaaagaaagtttggaagatctgatagatgggttaatgtttcacccaaacagttccatagataaagaattaagaagcagaggactgatatcaacaagtgatcaaattgagactttctatactgaaagatccttactcttcagtcagcaaatagctatctcctatgacccaaagcacaattctattgattatggattgcctgctattgatccattatcacatagcccaaatggcgatacagatgtgtgggaaagccctttcatgtataaggaaactagcaaagattttagtagtgaatctttactaaataactgcaatgatattatcttagagaaatctagtcagtataacaaaatatgtaacgactttgaccattgctcaagtcccaacaaatatcagtatactcttccaaagaagcctttcaattgtgataatttctttactcaatgttcaaagctttctatccatcaatatgttcaagataattgttacaagagtatcgattgtgacacaatgtttaataaaactttaaatgttattacacataaaattcagcattcccagaaatcctacaaatgtaatgaatgtggcaaagcttttaaatattgctcaagttacagaaaacacagaataattcacacaggagaaaaacccttcaaatgtaaagtatgtggaaaatcctttacccaatgtgcaagccttaaaaaacatcagagaatccacacaggagagaaaccctacaaatgtgaagaatgtggcagaagctttaaccactactcaattcttggtcagcaccagaggattcatacaggagagaaaccctacaagtgtaaacagtgtgggaaatcctttactcaatgttcaagccttcagaaacaccaagtaatccacactggagagaagcccttcagatgtgcagaatgtggcaaatcctttacgcaaaactcaacccttagtcaacaccagagaattcatactggagaaaaaccttacaaatgtgaacagtgtggaaaggcctttacccaatgttcaagccttagaaaacaccagagaattcacactggagagaaaccctacaaatgtgaagaatgtggcagagcctttaactgccgttcatcttttactaaacacacaagagaattcacacaggagagaaaccttacaaatgtaaagactgtgacaaagctttcatccactgcacaaaccttactcaacaccggagaatccatacaggagagaaaccatacaaatgtaatgaatgtggaaagtcctttagtcagtgttccaaccttagaaaacatgagagaattcatacatgagtaaaactaacaaatgtaaagaatttagtaaatcttttatccatatgcaaaaaaaaaaaaaaaaaaaaaaaaaaaaaaaaaaaaaaaaaaaaaaa

SEQ ID NO: 4157 - DNA, 1018 bp, Rattus norvegicus
  Genbank Accession No. U67915
tccaggctgcaccactggcaacaaaaaatgcaggccctactattcctgatggctcttctcttgccttctggagctggagctgaggagattatcggtggtgtggagtctagaccacactcccgtccttacatggcccatctggagatcaccactgagagaggttacaaggccacctgtggtgggtttcttgtgacccgccaatttgtgatgactgccgcacactgtaagggaagagaaaccactgttacccttggagttcatgatgtgagcaagacagaatccacacagcagaagataaaagtcgaaaaacaaattgttcacccaaattataacttctattccaatctccatgatatcatgttactgaagcttcaaaagaaagccaaggtgactcctgctgtggatgtaattcccctgcctcagccctctgactttctcaagcctgggaagatgtgccgggcagctggctgggggcaaactggagtgacaaaaccaacctcaaatacactgagggaggtgaaacagagaatcatggataaagaggcctgtaaaaactattttcattataactataacttccaggtctgcgtgggcagtccaagaaagataagatcagcatataagggagactccggaggaccactagtgtgtgctggggtggcccatggtattgtatcttatggacgtggagatgcaaagccccctgcagtcttcacccgaatctccccatatgtgccctggattaataaagtcataaagggcaaggatctgaccagcctgagtctgcacgagtcagagtctccaagctagagaactcttttgatatcccttgggatcaacaaagcctgtccccagcctgtcacctgcttgtcccatacctgttcccagcctgcccccaacttgcccccagcccatccccagcctgtcccaagcctgtccctaggatgatctcaacaatacacaagtctgtggtgatggattgttccctgtaaagcacctcaataaagacataacctca

SEQ ID NO: 4158 - DNA, 1765 bp, Rattus norvegicus
  Genbank Accession No. U68168
ttgaaaaggtactggaaactgaggaccctatctggatcaaagcagtttctgatggagccctcgcctcttgagctaccagttgatgcagtgcggcgcatcgcggctgaactcaattgtgacccaaccgatgagagggtggctctccgcttggatgaggaagataaactgaagcgttttaaggactgtttttatatccccaaaatgcgggacctgccttcaattgatctatctttagtgaatgaggatgataatgccatctatttcctgggaaattcccttggtcttcaaccgaagatggttaaaacatacctggaggaagagctagataagtgggccaaaataggagcctatggccatgaggtagggaaacgtccttggattataggagatgagagcattgtaacccttatgaaggacattgtaggagcccatgagaaagaaatagctctaatgaatgctttgactgttaatttacatctcctgctgttatcattctttaagcctacaccaaagcggcacaaaattcttctagaagccaaagccttcccttctgatcattatgcgatcgagtcacagattcaacttcatggacttgatgttgagaaaagtatgcggatgataaagccacgagagggggaagagaccttaagaatggaggacatactggaagtaattgagaaggaaggagactcaattgctgtggtcctgttcagtggcctgcacttttatactggacagctgttcaacattcctgccattacacaagccggacatgcaaagggctgttttgttggctttgacctagcgcatgcggttggaaatgttgaactccacttacatgactgggatgttgactttgcctgctggtgctcctacaagtatttaaattcaggagctggaggtctggctggtgccttcatccatgagaaacacgctcacacgatcaagccagcgttagtgggatggttcggccatgaactcagtacaagatttaacatggataacaaactacaattaatccccggggtcaatggattccgaatttccaaccctcccattctgttggtctgctccttgcatgccagtttagagatctttcagcaagcaactatgactgcgctgaggagaaaatccattctgctgacaggttatctggaatacttgctcaaacattaccatggcggaaatgacacagaaaacaagaggccagttgtgaacataatcaccccatccagagcagaggaacgaggctgccagctgacactgaccttttccatttccaagaaaggcgtttttaaggaactagaaaaaagaggagtcgtctgtgacaagcgagaaccagaaggcatccgggtggccccggttcctctctataattctttccatgatgtttataagttcatcagactgcttactgccatactcgactctacagaaagaaactagccatgctttctaaataactcaagtaaatctcacacactgggggttccacttctactgcattttagtcattcaaaagtctccagaaattgatggcatagaaatgatgatgattttataaacttacataaaacctggtacatgttttaatatctgtgtcgctgatgtgctgtggactaagaagtcacattttacatgactccaacctacagatgactgtcttgatcagctgtcaccttccatggtcactgaaaggttgtgtgtttaatttgtgactgaaatgacaacattaaaatgtatctggacttcttgtataaaaaaa

SEQ ID NO: 4159 - DNA, 1498 bp, Rattus norvegicus
  Genbank Accession No. U68544
cgcgcgccctcgcccgacccgtgacagcgatgctagctctgcgctgcggtccccgcctgctcggtctgctctccggcccgcgctccgcgccgctcctcctctccacgacccgtacctgcagcgacggcggagcccgaggcgcgaactcttcctcccaaaacccgctcgtgtacttggacgtgggcgccgacggacagccgctcggccgcgtggtgctggagttaaaggcagatgtcgtgccaaagacagcagagaacttcagagccctgtgcactggtgagaagggctttggctacaaaggctccaccttccacagggtcatcccagccttcatgtgccaggctggcgacttcaccaatcacaatggcacgggagggaagtccatctacggaagccgctttcctgacgagaacttcacactgaagcacgtgggaccaggtgtcctgtccatggcaaacgcaggccccaacaccaatggctctcagttctttatctgcacaataaagacagactggctggatggcaagcatgttgtgtttggccatgtcaaagagggcatggatgttgtgaagaaaatagaatctttcggctcaaaaagtgggaagacatctaagaagattgtcatcacagactgtggccagttgagctaagtcacagccaaggtgctaggacagcagcaggcagccatgtcttggttcacccaggtactccaaagaactgtttgtacccacttctactgagtatgaggaaggccacttgggcacatggtcccccacaggaccaggctgctctcaactgtccatccttcctcagatccatttctgggcatcagcatggccactgggccatgtatccttagcaagtgtctcggtgattgccattgtgtgtgccttggacatcggcaatgctgaccagttagtcagagaaggctcctgcctttttccttgaccagcggggacagcagttgctatttaatgttgtcttcctcattgcaataatttaacaagatctcataggaacaagctactacactaactgcactgtctatgtgtgactgagttggcacaagccacagacaccccaccaccaccaccaccaccaccaccaccacctccccgcctggcttctgaaacataactcagggctcttgtgaaagtcccaccatcaatgcctctccttctggtcactgtgaatcctgctggttggctgctgtgattttctgaaaggagcctgtgaaatagaagcagctggacctggggacagacctgtgagccaggcctgtctgctcaatgtgaattcctgtgttgaaaacttacagaaactgcctgaattcatgctctcctcaagagggaagtgttttctggtaggctttgctttttctgtatgttaaatcaatcaatcaatgatatatatgtagaagatttctgaacagtcctctgtgttcatctcaaatgtgataaataaatcctattttctataaaaaaaaaaaaaaaaaaac

SEQ ID NO: 4160 - DNA, 13894 bp, Rattus norvegicus
  Genbank Accession No. U68562
ctttgggtcacccaggaactgtatgaagttgcaattgagaaaatgcctttattagattggcccacaggagagctgatggtacagaatctgaatgatggatgtaggaagcatctctgggtcatgccacccctgggtaggtggcagtgggctgtgtaagaaagcaggctgagaagggtgcaagctgtaacagcctaggtccatgctctttgctttagcccctgcccatggtttcctgtaagtttccttgaagttgagataaactttcttctcagagtagctcttgctcagcagttatcacaggaatagaatataaactaagacagtacctaagtgtaagtccccattcatctatgtaataatgccaaattcatcctgaaagatcatttacctagaaatccattatttctcataactctttaactctgtagcttacttgaaggaaaagcaccttaaattaccagactgtccactcatttatattatttatttggaaatgtttgtaacagtacagtgaaactaaatttcagagacaatggctgtcagtttaggcatcatccgtttattataaaagggaggcatggaaattatttacatgatgaaatagttcagaatatcagtggaatgggcagcttcatgtgacaccatttcaacagtgatttcagtcgacatactttccaagaatgtcgccatctctaaataagaagtaatcctgtgaataaagagaccactgattaagatagtaataacaaatataaactgattttttttttggttcttttttttttttttcggagctggggaccgaacccagggccttgcacttcctaggcaagccctctaccactgagctaaatccccagcccctaaactgattttaaatcattagctttacttaccttgtcgtctagtactactttggtgcctccgtgttctgggagaagaactttatctccaactttcacactgacaggctgaatctctccaccctgatgaaaacagacacttgttagcaaagatgtatgtcttgttcactagatacacattaaagtttttgtttcagtatgtacaccaggagcctcctgcctcaggtttgtgttaattataggcattaatcacattaaaactgtaacttttaagtcactaaatttgtaaaagtgctcaaaccagtatctggcaggtacctaattagtggttaagcaatatagaccttacctacattaaatgtagaccttcataatatagcatcactgtagttactatatgacagagatgccttcagtgggcagctaaggttggctaactttttactgttaaatattaacacaccgtaagaccaagggaagggaagtaaagcaggtacttgttacactagacagcaaatggtcatgtatgacttcgaacaaatcgaaaaaattggcattacttttctccatttaatatacatttattgacttaatgtccttgttgtcaagacacagacttggtcagagactgaaggagaatgtccactcccccatactctagcggtttagttaagtgaagaacacccagagtagttcacctcctttctcaagtaggccaactaaaactcgaaatggtgtaggatgatttcagtgtctgggctaagccaacagtcaggctcctccacccatcaccgcacccttgcttttggggaacgggagtggggtgatggggtctatgtaaaaactgactggccattaattctggatccccctcactcagcactgtacctgtgctagaattagttttgtgccttattaaatacctcctccttcaattctgaaaagacccctgggtttatctacttgtatgactctttctgtctatttaaaatttgaagagtaggctacaaaataactacagaggtatttctttttttttttcagagctggggaccgaacccagggccttgcgcttgctaggcaaggcctctaccactgagctaaatccccaacccactacagaggtatttcattttgtgaggttttgttttactttgagatatggtctcgtcctgtacctcctgttggcctacaaggctctataatccacttgccttggcctccaaagaacctgggttagaggcatgaggcactatcaaggcaggcactttttaatctgtagtgtggggcactgctgaattagctcagtgggtaaagagacttgctatcaaagtatgggaacccaagttgccatcccaacactatagtaaaaaggatgtaacccccaacatgctcaggccagaaaccagactagttcaacacgactttaccccaaaagagtaaggtggagatggccctgcaacacatcatacagacatgtgcacatacagtcataccactcaaataccctctgcctttttacagtccctgtcattccttagaaatataaaacattctaaaattgttttcctgaatgcgaggttcttcgtgaattgaaatctaacttgaaattacttccaaaaaaaccttgccatttttaattaactttttaattaacaaaccaattcctcctccttcccacatcacataaaattctgtaccactctaggagctccgggttacacctttcctttcccgcctgatcccacagccacgaccgttgcttgcaatacttttccttgagacttttctggaagcataatgccacctttggtcacagtttcagcggcactcctttcaaccaatactctgtcaaatagcggaagaaacttcctaaaagcttgtccagcctgtggagagaaatgtgttcaaacagacagtaattaagttcgaagtgtcaggagacgagttaattaaataccactgcaaaccttaacattaatagtcgaaagccttccaaaatgaacagaaaacttaagtgtatctttagaatatagcccttcaatgttcactccatatagccagttgattttcatttccttgtctgttgtgagtgtgtgggggccgggggtcttcattcgctcatcagcaatcgcaaccttggtctttctccaaggtcaaatatttttcctttctcagatttttttttcaaactcgagtaacaggggagtggtgtcaatttttaagcccgatcttactctttctccaacataggactcattcacctaggctgtgccagggcaggtgggcttctgagtatgtacccgggcgcccgccccctgctccagacgcctgccgcacacgtgcgtgcagaaaagccgtggtggagaaagggtcggataggcctcgcttctgtagagcaacggaggtcgctggacactgagtgacccctgtcctgtcctgctagtcccaaagcgcacatggatccgtcggcctgccagccacgagcactcaccatgacttacgccgccgcagctccggactctgcactcggactcctgctgcaaggagactcccgtgggccggctcaggacacgtgaaaagacagcgcagcgcgcaggcgcactcagccccttagcgtgagagaaggcggccactccagcgcgcgcgccgattggtggccaggactccgcgcaggcggccgatgcgggtagccggaggcggaagaaaaggggagcactttctaggcttttccaggtcggccgctgaggtgaaagaacaagcccctcccggaaatgacgccacttgacctttcacccacgaaaagcgcggggccttccggaaggttctagaaccgagcgcggcccaggaaccagtgtacggcggcgggagagtgctgaggccacggggctgaggccgctcaggtaaggagggcggggccgcgcgcgtcgcatgcagattgcagggccggggcgtgggagaagtggggcgcgcgcgcgcgcacgcggggcgcggggcggggccggggagggaggggactcgggctcattgcggtgcgcgcccagtgctgggtccctcactcgccgcagacggcctgcctcgcctcgtgctcttccgccgccgccccgcaggtacgcggcctcggcgtgcacggcggcccggtgctcgtgggcctgcttgcagcgcggaccgagcacggagggctggggataagtctgtcagcgacgcgcaggctcggttcacttgttcaggcccagtagggccatactgctttcatcacgtgcggcgggcaccacgcgacctaggctaagcgcgggagcaagggcgggctagggtgggagcaacttgggccctgtggttccatctgcgcctggcgactgtagggctctatcggagggtggtcgcggtcctctagtcgctgtggccgcggtgatccggcgccttcactttgaccttgctcggggctcctggtcgagaagacacgtggggctcggcgcgtgcgctgagctagggcccttttctccggccttgcttgctgctgtgctactgtagctccgggtggatgctggcgggcacactctccttagagggttttgcaccgtcattagtacttctgtgattctctaggcacttgcatttagaacctgcctgcttacaccaactttttttttcagacacttttcggagtggatctgcttccaaggccgttttggcagtgaaagattaactcgagagggcaggagggggtggccatggggaggtggtttcgtgtgctttgtgctagtgctgtaggtcaggcatgggggcagcctccatgatcagttggttaacagattatgtcctgaatctgcagcgccgttagcagagaacagcagaactccaatctagccaccatattttgaagcaccgttggacaagtttgtagtgatactttttttctttccccagaaatgcttcgactacccacagtccttcgccagatgagaccagtgtctcgggcactggctcctcatctcactcgggcctatgccaaagatgtaaaatttggtgcggatgctcgagccttaatgcttcaaggtgtagaccttttagccgatgctgtagctgttacaatggggccaaaggtaccagtatacttatgtcgtgttaaagaatagtgttctgtagctgcaagacagcattttgtaatcgagttttgtgagtatctgatttgcatgtggtacaacttagtggtttggggggtgttatttaggtttgttagttggtcattctacgacggtgtccttactgctgcttcagtcgatttgggagacttctgtgcgttgtgatgtaatagtaacagctcaaggaagattttcaaaccagagtcatgactgtgtgcatgcttgcattaaattttggatcccatcccagtagttagagggtatatagaggggaaagtacaactccactctaataactcaagtgcatagctgtaatgtgagcgttcactgaacgctgaaatttccaacataaaaggcaaatgcactagtgtagaatcattactttaaaggtgtcgtatttttatatgcattttattctgcctgcatttatgtctctgccagggtgccaaggttctgggaactgacttccccctttggaagaggagcctgtactattaccaccaagcctgtctttacttaactttatgagctttgttgtttgggtcttttgtttgttttattcaagatgcatttctctggtagcctaggctgtcctggaactcaaagagatcatctacctgcttctgcaacacattgtcagactctttttacttgccctttgggaaaaactttgtggtctcccattcatctctacattgtacatacctcatgtttctgcaattatcacattgcaaagatttgtctagttttgggtttttgagtctcactagtttagtctggcttctaacgcccgtggcaaggctatcctcacatctccagcgtaggaattcagtattctactcacccagtgtgtttttattatgacaaggtctctaaccatagctggccaagtcagccttgaacttgagcactgctaagatcagaggctgggatcacacatttaagtggctgaatagggagctatagtactttgaggacatcattggatacagtgaggtcattttaaattgatactagactgaactgcataatcccagcattcaggaggctcaggcaggtggatctgaaagccatggatctaaagctataagagaaatcctgtcttgaaaaacaaaacaacaaaaagccctgcatctttaagtactgtttacatagctcaagacagaatagaagcttggttcaaatccaaaagttgccaataccgtcgttgccatatttgaagtttttattgagtgaaccagaagagcccatatttatcttactggctgatatttagtgaatgaattttaaagcaaaacatgtttttgataagcagggcattagtgagtggttcttgcctctggtcccagccttcaggaggcagaggcaagtagatctttgtgctttgtgagtttgaggacagccatggctgcacacagaagaaccctgtctcagaaaacaaagccagttcatagccaaactcaagtacaaacgatgtgaagaatgtcctgggatctgtgttttcttgttttataggtagcatctgttagttccagggaattcctgttgtgcctcagtcaaagttagactccagggcacatgagtagtgttcattttgtctatacacctaagatggttgattaacttggctttgaggttcgtgttgcaggattgttaacaatgacaacttcaaggattatctttaagggttgatattttttttttttgtcactatagggaagaacagtgattattgaacagagttggggaagtcccaaagtaacaaaagatggggtcactgttgcaaagtcaattgatttaaaggataaatacaaaaatatcggagctaagcttgttcaggatgttgccaataacacaaatgaagaggctggggatggcaccaccactgccactgttctggcaccgtctattgccaaggagggctttgagaagatcagcaaaggggctaatccagtggaaatccggagaggtaagagtttgtccttgatcctatgctgtaaagaattctacatcttcatctttgtcctttttgttgtagagtttgtgtatgttcttggtagagttgcccttccttacttatgtggatttccaagattgaactgaggccttcaggcttgtgggtccagtacttttactccctagacctatcttccacaccttgttttttaacttatttaatggaagtgaaaatacagggctttcggtatatccctggctgtcctggacacgcttggtaactttgtagacctggctagttagcttcaaatagatctgactgcttctcctttctgagtgctggggttaaatgtgggcactaccacccatgcccaaggccctgtagtattacttaacctttgatccatcccgtgagccctaagtagtgagaattctgaaactatcttttcttgttttgattaggtctcctttttagccttccctgacatggttccctatataatccatgcaggtctcaaatttttagccattctgtctcagtctcttgggtcctcggattacatgtgtgagccaccatgcaacatctaggtcaagcttttcaaaatgttggttttcagtctaaatgattgattgaatgcatactgttgtttggtgcagttgggagagtgctgacatgagaggttgcatgtgatcgttagaaggaatctgtaattcttagcggggaccatgataagcattgtagtaacatacattcttgaactaggtgtgatgttggctgttgatgctgtaattgctgaacttaagaaacaatctaaacctgtgacaacccctgaagaaattgctcaggtaaggattttatttcgtgttgaaaagaataattttgatcttttggttccaagaacaggatttgggtttgtctttgtagccatgactatcctggaattaaacgtatagatcaggctgaccttgaactcaaattcctctgcttccaaagtgcttgccccatcactgttagatcttactctttttagttttacggtgctgtaaataaaatttgtgttatttgtgaaaatattcttaggtgatatcaatgtaccctgtactatatgggttcaaacctagtccttgaagcatagttaacaagtgttttttatatgtatgtgcctgggtgttgtgtgggttgcaccatatgcatgcatgaacccataagaagaattaagagacagttgccagccactctggtgtaggtgctggcccgaacagtaagtcatcttaaccactgaggcatctctccacctctttagttttagtttattcttaatgtgtcagataatggaggaatgagggtgtagctccatttaaaactaacaactggccctcttgctctcttccttgctctgtccccttgctcctttccccttctctccagtcccctccccactccccacgtgctcatggtcggctctacctttcttctgcctttttctgtctttactacccatcctcatgccctaaataatcaattctattttaaaaaaaaaactattaactgtaaaataatcagtttagagtgtcaaaggagaagaaagttgaaaatattaatcttaccatttgattttgaagtaaattggttatttcaggttgctacaatttctgcaaacggagacaaagacattgggaacatcatttctgatgcaatgaagaaggttggaagaaagggtgtcatcacagtgaaggcaagcatgggatttgatatgttttgataatatcttcaatggggtgtctgtaacctattttccaaataaaaacttgaatctcttgtttgtgtcagtacaattcattcctttgtcttaacatctgtattgagtatatgctcactattagtctgaatatttgccccctacaatgagttcatctaacttaaataattagctctctgctagctgtaaatagaatggagcctctaatcctggctgtctgggaactctaggcttcaaccttagagagatggcatccctctgtcatctcttctttctgaagattaaaaaaggcatgggttcctgagctcaactttagttagtggcttgaatttttgtgggagtgcagttagaggacactgcagcatttccatgttgagtcccttatgcctgtgtcatctcttgctaatttggtatgtaatttcaaatgttggcttatgtttttgagacagggtctcattgtgtagtcatgtttttgagacagggtctcactgtatagatagtccaaattaggcttgtgtttcttttaagagattttttctatctatgagtgtttgtttgcacatgtatgtgcaccttggagtccagaagaaacagcagaatcctaggaactgagttgagaaccatcatgtaggtgcacaaaacccaattttattcaagaaaagcaaatggggctggaaagctggatggctcagtgattaagaacactggttgctcttccagagaccatgagttcaatctctagcaaccacatggtggctcacagcaacctaaaacgggatatagtgccctggtctggcacacaggtgtatatgctgataagagtatgtaaaatatataaaataagtatatctttagaaaaaaaagagaatagcaaatgttcttaacccttgagccatctttaggtttagctgaccaagttttgtttctttagtttaaataggatggaaaaaccctgaatgatgagctagaaattattgaaggcatgaagtttgatagaggatatatttccccatattttattaacacatcaaaaggtaagagcccatccacaagtgaaagtcgtcacaatatgctctaagctgctaacttactgtcagctgtgggtaatgggtatggctgatgcaataagtaaaaactgtgatgtttaaacattaatggtttggtaaatgaagaagaacatgagttactggtctcattgtggaagtaaattgttttactgctcattgtatttataggtcaaaaatgtgaattccaagatgcctatgttttgttgagtgaaaagaaaatttctagtgttcagtccattgtacctgctcttgaaattgccaatgctcaccggaagcccttggtcataattgctgaagatgttgatggagaagctcttagcacactggttttgaacaggtaatagataaattggattgggtttatatatttttagatagaaggtaatttctttcttttgcttttttgaaattccacattttgcttgtgtgtctcaaagctgtagtatatatgatgtagtgctctatgcattatgagtctatctctagctggtctcaaatgcacataattcttgagcctgtgcctcccacagcttcccagagaaaactatacatatgtcttttttttttttgtaagatttattatatataattacacaagggagcatcagatcttattacagatggttgtgagccaccatgtggttgctgggatttgaactcaggacctctggaagagcagtcagttttctcaaccaactgagccatctctccagctctacatatgtctttttttctttttttttctttctctccttttctctcctttttttcggagctggggattgaacccagggccttgcacttgctaggcaagtgctctaccactgagataaatccccaacccctcacacatgtctttttaacactggtgtgcttagcactaatgcccaactgtgtctggcaatgtaagagcagcatttctttaagaagggaatcaggttgaaacaaatttagatgagtagaggtccccatctcatcttttttaagaccagaagttgaaggaaaagagtagggtctgtacagtcatgtagacctagaacttaccagggactaaactagatgctttttcccaattccccctttggtttacatcttacgcagttaaatgtctttacaggctaaaagttggtcttcaggttgtagcagtcaaagctccagggtttggggacaacaggaagaaccagcttaaagatatggctatcgctactggtggtgcggtaagtaaaccttgtcatactgctttgctcagtgttgtttatgcttccagatcgtaaatacaatgtatacttcacaatagatgggctgtttctttctattggatatttggaacacgggttggattaaggtctcacttctaacttactgagcctggcctgagaatggacatgattaaaagttcttctcaaaatttaaaactaatttgtgtaagtgattttatttagactttgttctgatataccagtggaaaaatagcatttctttctctggatttttaagctttatgtatatgggtgtttgtctgcatgttttgtatgatgtatacataccagaaggcattttatccagttccatagcactacagttatagacagttgtaagctgccatatggatgctgggatttgaactcaggacacctgaaagagtagaatagctctccagtgcttgtgactgctgagacatctcactagccctgaaaagctgtttttcacaaaaatatttgtgactatagtaataaacctagtataatggaagccactaacagcacattgtttttataggtgtttggagaagagggtttgaatctaaatcttgaagatgttcaagctcatgatttaggaaaagttggagaggtcatcgtcaccaaagatgatgccatgcttttgaaaggaaaaggtgacaaagctcacattgaaaaacgtattcaagaaatcactgagcagctagacatcacaactagtgaatatgagaaggaaaagctgaacgagcgacttgctaaactctcagatggagtagctgtgttgaaggtaagactgacttgcaggtaaacattttaggctgagtctggtgatagtggttctttagtatttaccaatagtaactaagtgacctttccccaaatctttagtttttgttgctcgtttgttttggtttttgcatgtgctataaccaactttccatggggcacatgtaaagggacaactttcagcagttggtcatctacctttgcagtgatttttagaagcaagcaagccctttgacccacttgggtcatatccttaggccttctgagtcatcaataggcatctatcccctactggtattatgcatgagaccgaaaccattcttgtgctgtgtcatgcaaacagtctatcactgcccagtttcccagcttccttttctctttttctctgtgtagccctgactgtctcggaactcactctgttaactctgtagacaggattttcagtcctagaactcacttagtagaccaagctagctttgaactgaaaatcgctgcctttgcctcccaagtgctgggattaaaggggtgtgcacttctgcttggctagcatcctattctcacagggcagtacagcttgtgttgtaggaagttttgatagggggatacattataacctattactctagaattgcttccttctttgtttttgttttgaactctgctgtcacccaggcaggcctccgttggtataacccacctgccttaccctctcaagtgctggggtcgttactatgacactatacccagctcaggtctgccatccaggtggcttcaagtaatcattgactgggaagggtcggtactacctggaattttttatttaatctttaggttggagggacaagtgatgttgaagtgaatgagaagaaagacagagttacagatgctctcaatgctacaagagcagctgttgaagaaggcattgttctaggagggggctgtgctctacttcggtgcatcccagccttggattcattaaagcctgctaatgaagatcagaagataggtaaagattctttcaaatgagtttgtggccagagaggtaattagcaatgcaccacactttacaggggattgtttcacctatggtaggattggatgtctgattgcttactaaacttttatctttataattattttatgtgtgtgtgggagtgcattttgctctcatgtctcgtgtgctgtgtgtttgcagtattctgaggggctggaaagatggctcagtggttaagagcactgactgctcttccagaggtcctgagttcaattcccagcaaccacatggtggttcacagccatctgtgatgagatctgatgccctcttgtgtgtgtctgaagacagctgtagtgttgttatatataataagtaaatttgaaaaaaaaagaaatgcagtattctgagggccagatggggtcatcagatagcttggaactggagttacattggtgctaaggattaaaccaggtcctctgaaaaagaaaccattaaccattgagccatctttggttccccaaaaagggaaaacaaaagtaagttcatgaaaatgtgtttgctttgtaggtatagaaattattaaaagagcacttaaaattcctgcaatgacgattgctaagaatgcaggtgttgaaggatctttgatagttgaaaaaattctgcagagttcctcagaggttggctatgatgccatgcttggagattttgtgaacatggtggaaaagggaatcattgatccaacaaaggtaaataaatcagcatttctaaacaatgaatgacttgctctctggtgtatggttttctttaatttttttctttttttcggagctggggaccgaacccggggccttgcctagcaagcgctctaccactgagctaaatccccaacccctttctttaatttttaattgttttactaaatttttttctaggttgtaagaactgctttactggatgctgctggggtggcctccctgctaactacagccgaagctgtagtgacagaaattcctaaagaagagaaggaccctggaatgggtgcaatgggtggaatgggagggggtatgggaggtggcatgttctaactc

SEQ ID NO: 4161 - DNA, 206 bp, Rattus norvegicus
  Genbank Accession No. U70270
cccctccgctccagactccaagctcctgctcccagcctactgacctagctctccccagcctgctctgtgatattgtcacatatgctgacctcctctcttctgcagattcctacacacacaacaacgtgtgagggaggaagaagaaagatgttttggggagtgactttctttttagatactgtacagtaagttggtcagaataaaag

SEQ ID NO: 4162 - DNA, 2472 bp, Rattus norvegicus
  Genbank Accession No. U72497
ggtttgtgcgagccgagttctctcgggtggcggtcggctgcaggagatcatggtgctgagcgaagtgtggaccacgctgtctggggtctccggggtttgcctagcctgcagcttgttgtcggcggcggtggtcctgcgatggaccgggcgccagaaggcccggggcgcggcgaccagggcgcggcagaagcagcgagccagcctggagaccatggacaaggcggtgcagcgcttccggctgcagaatcctgacctggactcggaggccttgctgaccctgcccctactccaactggtacagaagttacagagtggagagctgtccccagaggctgtgttctttacttacctgggaaaggcctgggaagtgaacaaagggaccaactgcgtgacctcctatctgaccgactgtgagactcagctgtcccaggccccacggcagggcctgctctatggtgtccctgtgagcctcaaggaatgcttcagctacaagggccacgactccacactgggcttgagcctgaatgagggcatgccatcggaatctgactgtgtggtggtgcaagtgttgaagctgcagggagctgtgccctttgtgcataccaatgtcccccagtccatgttaagctttgactgcagtaaccctctctttggccagaccatgaacccatggaagtcctccaagagcccaggaggttcctcagggggtgagggggctctcattggatctggaggttcccctctgggtttaggcactgacattggcggcagcatccggttcccttctgccttctgcggcatctgtggcctcaagcctactggcaaccgcctcagcaagagtggcctgaagggctgtgtctatggacagacggcagtgcagctttctcttggccccatggcccgggatgtggagagcctggcgctatgcctgaaagctctactgtgtgagcacttgttcaccttggaccctaccgtgcctcccttgcccttcagagaggaggtctatagaagttctagacccctgcgtgtggggtactatgagactgacaactataccatgcccagcccagctatgaggagggctctgatagagaccaagcagagacttgaggctgctggccacacgctgattcccttcttacccaacaacataccctacgccctggaggtcctgtctgcgggcggcctgttcagtgacggtggccgcagttttctccaaaacttcaaaggtgactttgtggatccctgcttgggagacctgatcttaattctgaggctgcccagctggtttaaaagactgctgagcctcctgctgaagcctctgtttcctcggctggcagcctttctcaacagtatgcgtcctcggtcagctgaaaagctgtggaaactgcagcatgagattgagatgtatcgccagtctgtgattgcccagtggaaagcgatgaacttggatgtgctgctgacccccatgttgggccctgctctggatttgaacacaccgggcagagccacaggggctatcagctacaccgttctctacaactgcctggacttccctgcgggggtggtgcctgtcaccactgtgaccgccgaggacgatgcccagatggaactctacaaaggctactttggggatatctgggacatcatcctgaagaaggccatgaaaaatagtgtcggtctgcctgtggctgtgcagtgcgtggctctgccctggcaggaagagctgtgtctgaggttcatgcgggaggtggaacagctgatgacccctcaaaagcagccatcgtgagggtcgttcatccgccagctctggaggacctaaggcccatgcgctgtgcactgtagccccatgtattcaggagccaccacccacgagggaacgcccagcacagggaagaggtgtctacctgccctcccctggactcctgcagccacaaccaagtctggaccttcctccccgttatggtctactttccatcctgattccctgctttttatggcagccagcaggaatgacgtgggccaaggatcaccaacattcaaaaacaatgcgtttatctattttctgggtatctccattagggccctgggaaccagagtgctgggaaggctgtccagaccctccagagctggctgtaaccacatcactctcctgctccaaagcctccctagttctgtcacccacaagatagacacagggacatgtccttggcacttgactcctgtccttcctttcttattcagattgaccccagccttgatggaccctgcccctgcacttccttcctcagtccacctctctgccgacacgccctttttatggctcctctatttgttgtggagacaaggtttctctcagtagccctggctgtccaggacctcactctgtagatgaggctggctttcaactcacaaggctgcctgcctgggtgctgggattaaaggcgtatgccaccacaaagaaaaaaaaaa

SEQ ID NO: 4163 - DNA, 1051 bp, Rattus norvegicus
  Genbank Accession No. U72632
  misc_feature (1)..(1051): n = a or c or g or t
agctgctctgctcggcctagcgcctgggcnaccccagccaggaggagtccgtttctggtagaagcctgtccagcctcaaggaacaatgacccagaagaccaccctagtgctcctcgccctggctgtcatcaccatcttcgctttggtttgcgtcttgctagctggcaggagcggagatgggggcagactgagccaacctcttcattgcccttccgttcttcctagcgtccagccccagacacactctggccagagccagccgtttgcagacctgagccctgaggagctgacagctgtgatgagctttctgatcaagcacctggggccagggctggtggatgcagcccaggctcgaccctcggacaactgtgtcttctcagtagagttgcagctgcctgccaaggctgcagccctggcccacctggacagaggggggcccccacccgtgcgggaggcactggccatcatcttctttggtggacaacccaagcctaatgtgagcgagttggtggtggggcccctgcctcacccctcatacatgcgggatgtgactgtggagcgtcatggcggccccctgccctattaccggcgtcctgtgctgaccagagagtatcaggatattcaggagatgatctttcacagagagctgccccaagcgtctggtctcctccatcactgttgcttctacaaacgccaaggacacaacctgctaaaaatgactacagccccccgtggtttgcaatcaggggaccgggccacctggtttggcatatattacaatctctcaggggctgggttttaccctcaccccattggcttagagcttctggtagatcacaaggccctggatcctgccctgtggaccatccagaaggtattctaccaaggccgttactatgagagtctgactcagctggaggacatgtttgaggctggcctggtgaatgtggttttggtcccagacaatggcacaggtgggtcctggtctctgaagtcttcagtgccaccaggccgagctcctcctctgcarttycayccngarggnccnmgn

SEQ ID NO: 4164 - DNA, 1070 bp, Rattus norvegicus
  Genbank Accession No. U72741
aagagatggctttcttcagcacccagcctccatacatgaacccagtcatcccctttactggaataatccaaggagggttgcagaacggacttcagatcaccctccaggggaccgtccacccttttccaaataggattgcggtgaactttcagactggcttcagtggaaatgacattgccttccacttcaatccccggtttgaggaaggaggatatgtggtttgcaacacaaagcagaatggaaagtgggggcctgaggagaggaagatgcagatgcccttccagaaggggatgccctttgagctttgcttcctggtacagaggtcggaattcaaggtgatggtgaacaagaacttctttgtacagtactcacaccgcgtgccctaccacctcgtggacaccatttcggtctcgggatgcttgcacctgtccttcatcaacttccagaactccactgcagcccctgtccagcctgtcttctccacaatgcaattctctcagccagtccagttcccacggatgcccaaggggcgcaaacagcgaactcagggctttcagcctgccctccaggcacccgtggctcaaactatcatccacacagttcacagcatccctggacagatgctctctactcctggaatccctcctatggcataccccaccccagcctatactatacctttcttcaccagcatcccaaatgggttttacccatccaagtccatcaacatatcaggcgtggtcttgccagatgctaagaggttccatatcaaccttcgctgtgggggtgacattgctttccacctgaacccccgtttcaatgagaaggttgtggtccgaaacactcagatcaacaactcctgggggcccgaggagcgaagcctgcctgggagaatgcccttcaatcgtggccagagtttctcagtgtggatcttatgtgaaggtcactgcttcaaggtggccgtggatggtcagcatatttgtgaatattaccaccgcctgaagaacttgccggatatcaacactctagaggtggccggtgatatccagctgacacacgtgcagacctag

SEQ ID NO: 4165 - DNA, 370 bp, Rattus norvegicus
  Genbank Accession No. U75392
  misc_feature (1)..(370): n = a or c or g or t
acagntgacaaccttgtgctgaatttgcaggatgaaagtttaattcggggaagngacagcttcattaagggtaagaagtgagtgtggacatcaagaaccccaccaccagagaagttggcacacttttccagtttggaggggccagctagggggtcaagcataccccaccctgacccaagcatcatgtgatggattcttctgtatctgctctcttggattaaggaagactgaagaccaaccctttcagaggggttttcctccttcttgtattggctgggaagggggggggacaggagacagtgtgatttctcagtgatttcctgtagtgttgtccctctccctgaatggggggagataaccaccatgccag

SEQ ID NO: 4166 - DNA, 178 bp, Rattus norvegicus
  Genbank Accession No. U75404
tttttgattgtactcttctatgctggaccgaattcatatgcagatcgaagtcactcctgttctttacagatggtattttgatagatactggagtttgtctgtgttatatctgtccccttctttaagaacaatgttgcattacgttcctttggataaattgtgatttgacaactgattt

SEQ ID NO: 4167 - DNA, 187 bp, Rattus norvegicus
  Genbank Accession No. U75405
  misc_feature (1)..(187): n = a or c or g or t
aatctgttccctcccacccagcccacttncccccaaccctggaaacagaccaacaacccaaactcaatttccccaaaagcnnaaaattgggagacaattttacatggactttggaaaacatttttttcctttgcattcatctctcaaacttagtttttatctttgaccaactgaacgtgnccaaaaa

SEQ ID NO: 4168 - DNA, 3348 bp, Rattus norvegicus
  Genbank Accession No. U75916
  misc_feature (1)..(3348): n = a or c or g or t
ctcgaggaaaactgcagctggtggtgttgagagacagcaagcagaccctcatcaacatcccatctctgaatgacagcgactcggaagtggaggatatctcggaaatcgagtccaaccgatctttttctccagaggagaggcgccagcagtattctgatcaggagtatcattcctccactgagaagctgaaggagaggccaagctcaagagaggagacctcaggcagaatgtccaggatgggtgccacacccacgccgttcaagtccacgggggacatcacagctgcaggtgtcacagaagccaacaaggaacccaggtcccaggaagaatccccagttcctcaacccagaacagcatcaagagtctttcttcgtcctagtcccgaaaatgaagcaatatatggccctaacaccaaaatggtgaagttcaagaagggagacagcgtgggcctccggttggctggtggaaatgatgttggcatatttgtggctggcattcaggagggcacctctgcagagcaggagggcctacaagaaggggaccagattctgaaggtgaacacacaagatttcagagggctggtccgggaagatgccgtcctctacctgttagaaatccctaaaggtgaaaccgtgaccattttggctcagagccgagcagacgtgtatagagacatcctggcctgtggcaggggagactcgttcttcataaggagccactttgaatgtgagaaggagactccgcagagcttggccttcaccaggggagaagtcttccgagtggtagacacgctgtacgatggcaaactgggccactggctggctgtgaggattggaaatgagctggagaagggcttaatccctaacaaaagcagagctgagcagatggccagtgtccagaatgcccagcgagagaatgctggggacagagcagacttctggcggatgcgtggccagagatccggggtcaagaagaacattcgcaagagccgggaagacctggcagctgctgtgtcggttagcaccaagttccccgcctacgaaaaggttctgcttcgggaagctggcttcaagaaacccgtggttctgtttggccccatagcagatatagcaatggaaaggctgactactgagctacccgacctgtttcaaactgcaaaaacagaacccaaagatgcgggatctgagaaatccagtggagtggttcggttgaatactgtgaagcaaattattgagcaggacaagcatgccctgctcgacgttacccccaaagctgtggacctgctccattatactcagtggttcccaatcgtgattttcttcaccccggattccagacaaggcattaaaaccataaggcagaagttgaacccaacatccaataaaatttctcgcaagttattcgatcaagcnaacaagtccaaaaaaacctgttctcatcttttaacagctaccatcaacgtgaattcagccaatgatggctggtttggcagcctgaaggacagcattcagcagcagcaacacgaagcagtgtgggtttctgaaggaaagatggaggggatggatgatgacgctgaagaccgcatgtcctacttaaccgccatgggtgcggactatctgagttgtgacagccgtctcatcagtgactttgaagatacggacggcgagggaggcgcctacactgacaatgagctggatgagccagctgaggagccgctggtgtcttccatcacccgctcctcagagccggtgcagcatgaggagagcataaggaagcccagcccagagccacgcgctcagatgaggagggcagctagcagagaccagcttagggatggtagcccgcccccagcattcaagccagagccgcccaaggtcagaaaccaaaacagagaggactctttcaactactccaagtcaaacttttctgccatggctggcagtgaaatcccggggggatccaccaaagggtgtcctccccctattgcggtgaaacctgcctttgggcgatccatcctgaagccttctactccagtccccatgcctgagagtgaggaggttggggagagcaccgaggagcaggaagaggctcccaaatcagtcctgggcagagtgaaaatcttcgagaagatggaccacaaggcgaaattacagaggatgcaggagctccaagaagcacagaatgcgaggattgaaatagctcagaagcatcctgacatctatgcggttccaatcaaagcccccaagccagatgctggcctgccccagcacatgagttctagacccccagagccacagaaagctccttctaggctttaccaggacaccagaggaagctacggcagtgatcccgaggaagaggaggagtaccgccaacagttggcagcacactcgaagcgtggttactacagccagccctcccggtaccgagacaccgaattatagagggccacttgtggactcctgcgagactccctggaggtcttctccagttaaaatgcactgcagagatacggtggggatccaggcaacagacagctcgaattatcaaccgaaggctctgttcgtgggactggagtaaagttggttatgactttttgaatgaagagaaacactatagcctgataatggttacttgctttggtgtggaccaaaaatctgtattaatctctctgtatttgtaatatgtatattgagcaataactccttctcctcgttcagagctgccttccagagctgcttcgatgtgaagcaaatgtgaacagggagtaaaaaaaaaaaaagtactccatctcaaactaaatccagaagtaatttatcacgactccctaagtgcctttgacaagatgtgtcttagtttgcttccctgaagctttatgcaaagctataatggactaaaacttttattttgactaaatttttataccagtttagcagctgtaactgccctcagcaccatgccaccttttcagggcattatcttgggagtgtggctattagttctacatagctcggaggccaagttttattagagtgtttgtccttgtttgtctgaaaccacgtgctccacaaagtcagaggcttgagaaaagggtattttatttccttcctatcagcatatgtactgacatcaggtggttttataatttaataaaaaggagtaccttgtggtcaagaatgagctttgtgctgaatntntacacaccttccttttgggctgtgtggggtggaatccaagatcctcatgcattcagagtgctgctccaccgctgaactataccccagacttcctgatttattttattttaattaaaaaaattaaaaagacttaaaaaaaaaaaaaaaaaaa

SEQ ID NO: 4169 - DNA, 1013 bp, Rattus norvegicus
  Genbank Accession No. U75932
ccatcgaaaagaacgtgttattttcacaccttgatgacaatgagagaagtgacatttttgatgcaatgtttccagtctcctttattgctggagagacagttattcagcaaggggatgaaggggataacttctatgtgattgatcaaggagaaatggatgtgtatgtcaataatgaatgggcaaccagtgttggggaaggagggagctttggagagctggctttgatttacggaacacccagagcagccactgtcaaagcaaagacaaacgtgaaactgtggggcattgaccgagacagctaccggagaatcctcatgggaagcactctgcgaaagaggaagatgtatgaagaatttcttagtaaagtgtctattttagagtctctggacaagtgggagcgtctcacagtagctgatgcactggagcctgtccagtttgaagatggacagaagattgtggtgcaaggagaaccgggggatgagttcttcattattttagagggcacggccgctgtgctgcagcgtcggtcagaaaacgaagagtttgttgaagtgggacgcctggggccttctgactattttggtgaaattgccctgctgatgaatcgtcctcgggctgccactgtggttgcgcgtggccctttgaagtgcgttaagttggaccgacctcggtttgaacgcgtccttggcccatgctcagatatcctcaagcgaaacatccagcagtacaacagctttgtgtcactgtccgtctgagatccgcctcctgtgcctctcctccccagtctatgcttcactcacgcagactgctttctcctccctctctgcagcgccaagtggccactggcttcacagcttcttgtctctgtatactaaaggttgctttattgcaccattttccattggagcgttactgaatgctcactcacaaataaatagagttgttgagaaaaaaaaaaaaaaaaaaaaaaaaaaaaaaaaaaaaaaaaaaaaaaaaaaaaaaaaaaaaaaaaa

SEQ ID NO: 4170 - DNA, 1604 bp, Rattus norvegicus
  Genbank Accession No. U76379
gcaggcctggctaaactggtgagggccctacccagccatgcccaccgtggatgatgtcctggagcaagttggagagtttggctggttccagaaacaagccttcctgttgctatgcctgatctcagcttctttagctcccatctatgtgggcatcgtcttcctgggcttcacccctggacattattgccagaatcctggggtggctgagctgagccagcggtgtggctggagccaggcagaggagctgaactacactgtgccgggcctgggaccctcggacgaggcctccttcctcagccagtgcatgaggtatgaggtggactggaaccagagcacccttgactgtgtggacccactgtccagcctggttgccaacaggagtcagttgccattgggcccctgcgagcatggctgggtatacgacactcccggctcctccatcgtcactgaggtttggccgtaagctctgtctcttggtgaccacgctggtcacatctgtgtccggtgtgctaacagcggtggccccagactatacatccatgttgctctttcgcctgctgcagggcatggtcagcaagggcagctgggtgtccggctataccttgatcacagagtttgtcggctctggctacaggagaacgacggccattttgtaccagatggccttcacagtggggctagtggggcttgccggggtggcctatgccattccagactggcgctggctccagctagctgtgtccctgcctaccttcctcttcctgctgtattactggtttgtcccagaatccccccggtggctgttgtcccagaagagaaccacgcgagctgtcaggataatggagcaaattgcacagaagaacgggaaggtgcctcctgctgacctgaagatgctctgccttgaggaggatgcctcagaaaagcgaagtccttcgtttgccgacctgttccgcactcccaacctgaggaagcacaccgtcatcctgatgtatctatggttctcttgtgctgtgctgtaccagggtctcatcatgcacgtgggagccacaggggccaacctctacctggacttcttttattcttctctggtggaattccccgcggccttcatcatcctggtcaccattgaccgcattggccgcatctacccaatagcggcctcgaatctggtgacgggggcagcctgcctcctcatgatctttatcccgcatgagctgcactggttgaacgttaccctcgcctgtcttggccgtatgggggccaccattgtgctgcagatggtctgcctggtgaacgctgagctgtaccctacattcatcaggaatcttgggatgatggtatgctctgccctgtgtgacctgggtgggatcttcacccccttcatggtgttcaggctgatggaagtttggcaagccctgcccctcattttgtttggggttttgggcctgactgctggggccatgactcttcttctcccagagaccaagggtgtggctttgcctgagactattgaagaagcagagaacctggggaggaggaaatcaaaggccaaagaaaacacgatttaccttcaggtccaaacaggcaagtcctcaagtacctga

SEQ ID NO: 4171 - DNA, 665 bp, Rattus norvegicus
  Genbank Accession No. U77777
atggctgccatgtcagaagaaggctcttgtgtcaacttcaaagaaatgatgtttattgacaacacactttaccttatacctgaagataatggagacttggaatcagaccactttggcagacttcactgtacaaccgcagtaatacggagcataaatgaccaagttctcttcgttgacaaaagaaacccgcctgtgttcgaggacatgcctgatatcgaccgaacagccaacgaatcccagaccagactgataatatatatgtacaaagatagtgaagtaagaggactggctgtgaccctatctgtgaaggatggaaggatgtctaccctctcctgtaaaaacaaaatcatttcctttgagaaacgtgtgccaggacacaacaaaatggaatttgaatcttccctgtatgaaggacactttctagcttgccaaaaggaagatgatgctttcaaactcgttttgaaaaggaaggatgaaaatggggataaatctgtaatgttcactcttactaacttacatcaaagttaggtattaaggtttctgtattccagaaagacgattagtatacacgagccttatgataacctactctgtatttctatgacaaaatacctgaggccgcatgatttatagagtaaacaagcttgattgcccaaaaaaaaaaa

SEQ ID NO: 4172 - DNA, 429 bp, Rattus norvegicus
  Genbank Accession No. U77829
gtgaggcgaagctgagcaggaatggccctgtggacctctgtgatgggacatctggtggaatctcacaggcagttctgtggcaaagatggatgaaagctaaggactcatgaggaagctggataactgaacaaagccatgtacaagaatgggaagccagaaaatgggatggtggagtttgaatcaggtggacagttctaaaagtacaaatgatttcgtataaaggtaccacatgtgggtccctttaactgaaggcatggcaagctccacacaaggtccttcatttctgaatttcaagggctcctctgacaagtggacagtgcagtgggtgcaccttttccagaggtgactggatggatgcttgaacagaagatttgccaaatagacattgtgctgtcaagaattttaccattaaaagtgcattattgtagc

SEQ ID NO: 4173 - DNA, 936 bp, Rattus norvegicus
  Genbank Accession No. U78977
caggaacgcaccggaaagctcacctgtgcagtaggggacggaggcaatgacgtcagcatgatccaggaatcagactgcggcgtgggcgtggagggcaaggaaggaaagcaggcttcgctggccgcggacttctccatcacccagttcaagcatctcggccggctactcatggtgcacggccggaacagctacaagcgctcggcggctctcagccagttcgtcatccacaggagcctctgcatcagtaccatgcaggccgtcttctcttccgtgttctactttgcatccgttcctctctaccaaggcttcctgatcatcgggtattctaccatctacaccatgtttcccgtgttttccctggtcttggacaaagacgtgaagtcagaagttgccatgttgtatcctgagctctacaaggacctcctcaaggggcggccactgtcctacaagacgttcttaatttgggtgttaatcagcatctatcaagggagcaccatcatgtacggggcgctgctgctgttcgagtccgaatttgtacacatcgtggctatctctttcacgtcactcatcctcaccgagctactgatggtggcgctcactatccagacgtggcactggctcatgacagtggccgagctgctcagcctggcctgctacatcgcctccctggtgttcctccacgagttcatcgatgtctacttcattgctaccctgtcgttcctctggaaggtgtccgtcatcaccctggtcagctgtctccccctctacgtcctcaagtacctgcggagacggttctccccccccagctactccaagctcacttcataagctgcaaggcggcagcagggcctccggtctctgcgctctccctggaggaggtcaagttcaggcgcatgaccacctcaggtggatggcgcagtcacagctggcacatga

SEQ ID NO: 4174 - DNA, 3435 bp, Rattus norvegicus
  Genbank Accession No. U83112
gcctggctcggccccgcgtggagcagcggtggcctgtgagggtcaaagcttgtgattctcgatggagagtgaaagcacagcttcatgatgagaaccagcccccggcggccactgattctcaagagacggaggctgccccttcctattcaaaatgccccgagtgaaacctcagaggaagaagcaaagagatcccctggacagcaggagcctactcaagcacaggcctcccaagatgtggcagagtccagctcttgcaaatttccagctggaatcaagattatcaaccacccaaccgtgcccaacacacaagtggtggctatccccaacaacgcggacatccagagcatcatcacagcgctgactgccaaagggaaagagagtggcagcagtgggcccaacaagttcatcctcatcagctctggaggggcctcatctcatcctcctgatcctcaatctcaagcccaaaccagcactgattccaagagaacagaactgatcaccgagacgttgggaccaaagccaggggctaagggtgtgcctgttcccaagccacctggagctcttccaaggcaaagacaggagagctgtggtggtgaagcggccggctgcacactggacaacagcttaaccaatatccagtggcttggaaagatgagttctgatgggctgggccgctgcagcattaagcaggaactggaagagaaggagaattgtcacctggagcagaatcgggttaaggttgaggcgccctcaagagcatcagtgtcttggcaggactctgtgtctgagaggccaccctactcctatatggccatgatacagttcgcgatcaacagcactgagaggaagcgtatgaccttgaaggatatctacacttggatcgaggaccacttcccttattttaagcacattgccaagccaggctggaagtgttggcaccaggcctaccacaagctcgggccacagaactctattcgtcacaacctttctctccatgacatgtttgttcgagaaacatctgccaatggcaaggtctccttctggaccattcacccaagtgctaatcgctacttgacattggaccaagtgtttaagccactggaaccagggtctccacaatcgcccgagcacttggaatcacagcagaaacgacccaatcctgagctccgtagaaatgtgaccatcaaaactgaactcccactaggcgcacggcgaaagatgaagccactgctcccacgggttagctcatacctggtgcccatccagttcccggtgaaccagtccctggtgttacagccctcggtgaaggttcccttgcctctggcagcatctcttatgagctcagagcttgcccgtcatagcaagcgagtccgcattgcacccaaggtgctgctatccaacgaagggatagccccacttcctgccacagaacccatgaaggaggagaaacccctgcttggagaagggctattgcctttgcttcctattcagtccattaaggaagaagtaattcagcctggggaggacataccacacttagagaggcctatcaaagtggagagccctcccttggaagagtggccctctccgtgtgcatcagtgaaagaggaactgtccaactcctgggaagattcttcctgctctcctaccccaaagcccaagaagtcctattgtgggcttaagtccccaacacggtgtgtctcagaaatgctggtgacaaagcggagagagaagagagaggtgagccgatctcggaggaagcagcaccttcagccaccctgtctagatgagcctgaactcttcttctcagaggactccagcacatttcggccagccatggagatcctggcagagtcttcagagcctgcaccacagctcagctgccctcaggaggagggagggcccttcaagacccccatcaaggagacattgcctgtctcctccactcctagcaagtctgtgctctctagagaccctgagtcctggaggctcacacccccagccaaagttggggggttagatttcagcccagtacgaaccccccagggtgcctttggccctctgcctgactcgctggggcttatggagctgaataccacacctctgaaaagtgttcccctcttcgactcaccccgggagctccttaactcagaagcctttgaccttgcctctgatccctttagcagttctccaccaccacatttggaagccaagccaggctcccccgagctgcaggtccccagcctttcagccaaccgttctctcacagaaggccttgtcctggacacaatgaatgatagcctcagcaagatccttctagacatcagtttccctggcctggaggaggaccctctgggccctgacaacatcaactggtctcagttcatccctgagctgcgatagaggcagggtcttacccttgccactcaagccaccagttatcctggcacttgtgtggctggatagtgcaaggctcagtgtaccccaaaccgtctgagggagctagcaggcaagggctgagcggtgccctttgacctaattatgccaaggtaaaagccacgtctaagccactgctgggacctatgcaagcaataggatctcccagagtcctccactccctgctggcaagtgaagtgggtgtgacagagccgtgaggaccaggaaatgcccacccattagtcacctgctgctcctggcaggataacccttgtaaatggtgtcagttccccaagttgtcctgtaattataaatgtagccatattcccttagctctcattatccagagactgccaggatgggtagggtgacaaggggttgcattagcttctgcttgtggcctttgggggcaggacctgcagttcagcctcttcacactgtgggttctgctgtaggcttctagacacacaggtgtccttgccaggaccccacttactgccctttcctcacagctccccctggttctaagccagtggtactgcatgaagaaatcctgcggcaaagcctattgtctctgggtgtgtggggacgggtgtgcctgaagcaaaagcatgggtactcacgtgagtcctttaggtgtttctctgatcgtgttcccaatcatgccagggagtctagcattgagaactcaggctgaggcctgaggaggaggaggaagtgaccactgacttgcctggcttccttagcttgcacctgagttttgcaaaaagccaccctagaccccactctacaagctagcacaagaacactactgtaactacctactgaataaagcccaggtggcctgatctcggaattgagtgaggggtgatggagcccggagatgatgggcaggcctgcacctgctgcatgggccttgcacaggttgtctctccacatccttctttgactctgaaaaaaaaaaaaaaaaaaaaaaaaaaaaaaaaaaaaaaaaaaaaa

SEQ ID NO: 4175 - DNA, 3903 bp, Rattus norvegicus
  Genbank Accession No. U83119
aggaagcaagaaactaatcgtcttggcaacaaaacaaagagaatgaaagcacacaaacataacctcacatccaaatatgaatataaagggagcaataatcactattccttaatatctctcaatatcaatggcctcaactccccaataaaaagacatagattaacaaactggatacgcaatgaggaccctgcattctgctgcctacaggaaacacacctcagagacaaagacagacattacctcagagtgaaaggctggaaaacaactttccaagcaaatggtcagaagaagcaagctggagtagccattctaatatcaaataaaatcaatttccaactaaaagtcatcaaaaaagataaggaaggacacttcatattcatcaaaggaaaaatccaccaagatgaactctcaatcctaaatatctatgccccaaatacaagggcacctacatacgtaaaagaaaccttactaaagctcaaaacacacattgcacctcacacaataatagtgggagacttcaacaccccactctcatcaatggacagatcatggaaacagaaattaaacagtgatgtcgacagactaagagaagtcatgagccaaatggacttaacggatatttatagaacattctatcctaaagcaaaaggatataccttcttctcagctcctcatggtactttctccaaaattgaccatataattggtcaaaaaacgggcctcaacaggtacagaaagatagagataatcccatgcatgctatcggaccaccacggcctaaaactggtcttcaataacaataagggaagaatgcccacatatacgtggaaattgaacaatgctctactcaatgataacctggtcaaggaagaaataaagaaagaaattaaaaagtttttagaatttaatgaaaatgaagatacaacatactcaaacttatgggacacaatgaaagctgtgctaagaggaaaactcatagcgctgagtgcctgcagaaagaaacaggaaagagcatatgtcagcagcttgacaacacacctaaaagctctagaacaaaaagaagcaaatacgcccaggaggagtagaaggcaggaaataatcaaactcagagctgaaatcaaccaagtagaaacaaaaaggaccatagaaagaatcaacagaaccaaaagttggttctttgagaaaatcaacaagatagataaacccttagccagactaacgagaggacacagagagtgcgtccaaattaacaaaatcagaaatgaaaagggagacataactacagattcagaggaaattcaaaaaatcatcagatcttactataaaaacctatattcaacaaaatttgaaaatcttcaggaaatggacaatttcctagacagataccaggtatcgaagttaaatcaggaacagataaaccagttaaacaaccccataactcctaaggaaatagaagcagtcactaaaggtctcccaaccaaaaagagcccaggtccagacgggtttagtgcagaattctatcaaaccttcatagaagacctcataccaatattatccaaactattccacaaaattgaaacagatggagcactaccgaattccttctatgaagccacaattactcttatacctaaaccacacaaagacacgacaaagaaagagaacttcagaccaatttcccttatgaatatcaacgcaaaaatactcaataaaattctggcaaaccgaattcaagagcacatcaaaacaatcatccaccatgatcaagtaggcttcatcccaggcatgcagggatggtttaatatacggaaaaccatcaacgtgatccattatataaacaaactgaaagaacagaaccacatgatcatttcattagatgctgagaaagcatttgacaaaattcaacaccccttcatgataaaagtcctggaaagaataggaattcaaggcccatacctaaacatagtaaaagccatatacagcaaaccagttgctaacattaaactaaatggagagaaacttgaagcaatcccactaaaatcagggactagacaaggctgcccactctctccctacttattcaatatagttcttgaagttctagccagaccaatcagaaaacaaaaggagatcaaggggatacagatcggaaaagaagaggtcaaaatatcactatttgcagatgacatgatagtatatttaagtgatcccaaaagttccaccagagaacaactaaagctgataaacaacttcagcaaagtggctgggtataaaattaactcaaataaatcagttgccttcctctatacaaaagagaaacaagccgagaaagaaattagggaaacgacacccttcataatagacccaaataatataaagtacctcggtgtgactttaaccaagcaagtaaaagatctgtacaataagaacttcaagacactgaggaaagaaattgaagaagacctcagaagatggaaagatctcccatgctcatggattggcaggattaatatagtaaaaatggccattttaccaaaagcaatctacagattcaatgcaatccccatcaaaataccaatccaattcttcaaagagttagacagaacaatttgcaaattcatctggaataacaaaaaacccaggatagctaaagctatcctcaacaataaaaggacttcagggggaatcactatccctgaactcaagcagtattacagagcaatagtgataaaaactgcatggtattggtacagagacagacagatagaccaatggaatagaattgaagacccagaaatgaactcacacacctatggtcacttgatttttgacaaaggagccaaaaccatccaatggaaaaaagatagcattttcagcaaatggtgctggttcaactggagggcaacatgtagaagaatgcagatcgatccatgcttatcaccctgtacaaagcttaagtccaagtggatcaaggacctccacatcaaaccagacacactcaaactaatagaagaaaaactagggaagcatctggaacacatgggcactggaaaaaatttcctgaacaaaacaccaatggcttatgctctaagatcaagaattgacaaatgggatctcataaaactgcaaagcttctgtaaggcaaaggacactgtggttaggacaaaacggcaaccaacagattgggaaaagatctttaccaaccctacaacagatagaggccttatatccaaaatatacaaagaactcaagaagttagaccgcagggaaacaaataaccctattaaaaaatggggttcagagctaaacaaagaattcacagctgaggaatgccgaatggctgagaaacacctaaagaaatgttcaacatctttagtcataagggaaatgcaaatcaaaacaaccctgagatttcacctcacaccagtgagaatggctaagatcaaaaactcaggggacaacagatgctggcgaggatgtggagaaagaggaacactcctccattgttggtgggattgcaaactggtacaaccattctggaaatcagtctggaggatcctcagaaaattggacattgaactgcctgaggatccagctatacctctcttgggcatatacccaaaagatgccccaacatataaaaaagacacgtgctccactatgttcattgcagccttatttataatagccagaagctggaaagaacccagatgcccttcaacagaggaatggatacagaaaatgtggtacatctacacaatggaatattactcagctatcaaaaacaacgactttatgaaattcgtaggcaaatggctggaactggaaaatatcatcctgagtgagctaacccaaacacagaaagacatacatggtatgtactcactgatatgtggctattag

SEQ ID NO: 4176 - DNA, 2195 bp, Rattus norvegicus
  Genbank Accession No. U89514
gccaggactgtccactcctcgggccacagctttgagcagctgaggcaaagctgtctgcagtcgggcaccttgtttgaggatgctgacttccctgccagcaatagttcactgttctacagcgagaggccccaggtcccctttgtgtggaagcggccaggggaaattgtggaaaacccagaattcattctgggaggggccaccaggaccgacatctgccaaggggaactgggagactgctggctcctggccgccattgcctccctaaccctcaatcagaaagcactggccagagtggtaccccaggaccaaggatttggttctggctatgctgggatatttcacttccagttctggcagcacagtgagtggctggacgtggtgattgatgaccgcctgcctacctttcgggatcgcctggtcttcctccactctgccgaccacaatgagttctggagcgcactgctggagaaagcctatgccaagctgaacgggagttacgaggcactgaaggggggcagcgccatcgaagccatggaggacttcaccgggggtgtggctgagaacttccaaatccgagaggcaccagaggatttctacgagattctggagaaggccctgcggcgtggttccttgctgggctgctccatagataccctgaatgcctcagaatctgaagcccgcacacctttgggcctcattaagggccatgcctacactgtgactggactcgaccaggtaaacttccacggccagagaatcaagctcatcagagtccgtaacccttggggccaggtggaatggaacgggccatggagcgacagctctcctgagtggcgctccgtgagcctggaggagcagaagcgcctaggtcacaccgcccttgacgatggagaattctggatggcatttgaggacttcaagacccattttgacaaagtggagatctgcaacctcacgcctgatgccctggaggacaacaccctccacaagtgggaggtgaccatccaccaaggaagctgggttcgtggctccaccgccggcggctgccgcaacttcctggacaccttctggaccaacccacagataaagctgtctctgacagagagggatgagggccaggagggctgcactttcctagcagccttgatgcagaaagaccgcaggaggctcaagaggtttggtgccaacatgctgaccattggctatgccatttaccagtgcccagacaaggacggacacctgaatagggactttttcaggtaccatgcctctctggcccgaagtaagacattcatcaacttgagagaagtctcaggccgcttccagctgcccccgggagactatatcctcatccccagcacctttgagccacaccaggaggctgacttctgcctgagaatcttctctgagaagaaagctgttactcaggacctggatgagaacatagacattgaccttcctgagcttccaaagccgacaccacaggaggaggaaaccgaagaggagcggcagttccgggccctgttccgtcgaattgctggcgaggacatggaggtgtcagcagaagagcttgaatatgttctaaatgctgttctgcaaaagaaaacagccctcaagttcaagaggctgaggctgagcctgctttcctgcagaaacattatctccctgatggacaccagcggcaacgggaagatggagttcgaagagttccgggtgttctgggacaagctgaggtactggatggacctgtttctccagttcgatgtggacaagtccggcaccatgtcttcctatgagttgcggacagcactgaaagctgcaggctttcagctgggtagccatctcctgcagctgatcgtcctcaggtatgcagacgagaacctccagctggatttcgatgactacctcaactgcctggtgcggctggagaatgcgagccgggtgttccagtgtctcagtgtgaagaacaaggacttcatccatctcaacataaacgagttcatcaacttgaccatgaacatctgagcttgcactgacctgatgccgtctgcccctctgatactcagctgctggaccatgaaccttagaatttttattggagggccatcccgcccattgctctctccccactccacaccaccctccttccctccctgtcgagatttaaatcaaaaagggattggccatgttctccg

SEQ ID NO: 4177 - DNA, 4413 bp, Rattus norvegicus
  Genbank Accession No. U90725
  misc_feature (1)..(4413): n = a or c or g or t
ggcgtcttgttcctgtttcgccacagttcctaccttatgagcttggattcctcacgctaataaaagaggagcagtaaaagctggcaggctgacagaggcaacctcaggacggactttctggctactgaccattttgctgtgtcttactaggattgtgtgtggacgtgagatcaaccatgagctccgttgcagttttgacccaagagagttttgctgaacatcgaagtgggctggttccacaacaaatcatagttgccacattaaattcagaagaagaaagtgaccctccaacctacaaggatgccttccctccactgcctgagaaagcagcttgcttggaaagtgcccaagaacctgctggagcctggagtaacaagatccggcccatcaaggcctctgtcatcactcaggtgtttcatgtacccctggaggagagaaaatataaggacatgaaccagtttggagaaggtgaacaagcaaaaatctgccttgagatcatgcaaaggactggtgctcacctggagctctctctggctaaagaccaaggtctctccatcatggtctcagggaagctggatgcagtcatgaaagcccggaaagacattgttgctagactacagacacaggcctcagccactgttcccattcctaaagagcaccaccgctttgttattggcaaaaacggagaaaaactacaagacttagaactgaaaactgctaccaaaatccagatcccacgcccagatgaccccagtaatcagatcaagatcactggcaccaaagaaggnatcgagaaagctcgccatgaggtccttctgatctctgctgagcaggacaagcgtgccgtaaagaggctagaagtggagaaggccttccaccccttcatcgctgggccgtacaatagacttgtgggtgaaatcatgcaggaaacagggacgcgaatcaacatccctccacccagtgttaaccgtacagaaatcgtcttcactggagaaaaggaacagctggctcaggctgtggctcgtattaagaagatttatgaggaaaagaagaagaagactacgaccattgcggtagaggtgaagaaatctcaacacaagtatgtcatcgggccgaagggcaactcactgcaagagatcctggaacgtactggagtctccgttgagatcccgccctcagacagcatctccgagactgtgatacttagaggcgagcctgaaaagctgggacaggcattgactgaagtctatgccaaggccaacagttttacagtgtcctcagtctctgccccttcctggcttcaccgtttcatcattggtaagaaagggcagaacctggccaaaatcactcaccaaatgccaaaggttcacattgagttcacagaaggtgaggacaagatcaccctggagggccccacagaagatgtgaatgttgcccaggaacagattgaaggaatggtcaaagacctgattaatcggatggactatgtagaaatcaacattgaccataaattccacagacacctcattgggaagagtggagccaacatcaacagaatcaaagaccagtacaaagtgtctgtgcgcatcccccctgacagcgagaagagtaacctgatccgaattgagggagacccacaaggtgtgcaacaggccaagcgggagctgctggagcttgcttctcgcatggaaaatgagcgcaccaaggatctaatcattgagcaaagatttcatcgcacaatcattgggcagaaaggtgaacggattcgagaaattcgtgacaaattcccagaggtgatcatcaactttccggatccagcacaaaagagtgagattgttcaactcagaggccccaagaatgaggtggagaaatgtaccaagtacatgcagaaaatggttgcagatctggtggaaaatagctattcaatttctgtaccgatcttcaaacagtttcacaagaatatcattgggaaaggaggtgcaaacattaaaaagattcgtgaagagagcaacaccaagattgaccttcctgccgagaacagcaactcggagaccattgtcatcactggcaagcgagccaactgtgaagccgcccggagccggatcctgtccatccagaaagatctggccaacatagctgaggtggaggtctcaatccctgccaaactacacaactctctcattggcaccaagggtcgtctgatccgctccatcatggaggaatgtggtggcgtccatattcactttcctgtggaaggttctggtagtgacactgttgtcatcaggggtccttcctcagatgtggagaaggccaagaagcagcttctgcacctggctgaggagaagcaaaccaagagttttactgtggatatccgggccaagccagaataccacaaattcctcattggcaaagggggaggtaaaatccgcaaggtgcgcgacagtactggagcccgcattatatttccggctgctgaggataaggaccaggacctgataacaatcataggaaaggaagatgctgtccgtgaggcacaaaaggagctggaagcattgatccagaacctggataatgtggttgaagactacatgctggtggaccccagacaccaccgccattttgttatccgaagaggacaggtattacgagagattgctgaagaatatggcggggtgatggtcagcttcccacgctctggcacacagagtgacaaagtcactctcaagggtgccaaagactgtgtggaggcagccaagaagcgaattcaggaaatcattgaggatctggaagctcaagtaacgctggaatgtgctataccccagaagtttcatcgttcggtcatgggtcccaaaggttcaagaatccagcagatcactcgggactacaatgttcaaattaagttcccagacagagaggaaaacccagttcacagtgtagagccttccatccaggagaatggagatgaggctggagagggcagagaggccaaggagaccgacccgggatctcccaggaggtgtgacatcatagttatctctggccggaaagagaaatgtgaggctgccaaggaagccctggaggcactggttccagtcaccatcgaggtagaggtaccctttgatcttcaccgctacatcattgggcagaaaggaagtggaatccgcaagatgatggatgagtttgaggtgaatatacatgtgccagcccccgaactgcagtcacacaccattgccatcactggccttgcagcaaatttggacagggctaaggcggggctactggatcgagtaaaggagctgcaggctgagcaggaagatcgggctttaaggagttttaagctgagtgtcactgtagaccccaaataccatcccaaaattatcgggggaaaaggggcagtgatcacacagatccgattggaacatgatgtgaacatccaatttcctgataaggacgatgggaatcagccccaggaccaaatcaccatcacagggtatgagaagaacactgaagctgcccgtgatgctatcctgaaaattgtgggtgagcttgagcagatggtttctgaggatgttcccttggatcaccgtgtgcatgcccgaatcattggtgccagaggcaaagccatccggaaaatcatggatgagttcaaggtggacattcgcttcccacagagcggagctccagaccctaactgcgtcactgtgacaggactcccggagaatgtggaggaagctatcgaccatatcctcaacctagaagaggaatatctggctgatgtggtggacagtgaggcgctgcaagtttacatgaagcccccagcacatgaagagtccaaggcaccatccaaaggctttgtggtgcgagatgctccctggacctccaacagcagtgagaaggctcctgatatgagcagctctgaagaaattcccacctttggggctcaagtggcccccaagaccctcccgtggggccccaaacgataatgatcaaaaagaaactttccagcctgctgcccaaacccaaccacacaatggtttgtctcaatctgactcagcagctggaccctcgtaaattgttgatgctccccctccccgaagtctcgcagcaaagcctggtgggctggccttctgtggctgcttcccctggcctggtcagcacccgcaggctcagggtctgctcctgacgctgtgctctgggaaagtgcacgccactgcgtgaaacactaagcaaggtaatcgagcatttcgtgatcacagactccagcttcctggtccacccagcatgtagtcagcattctgactttcacagcagagttccacagcggctaggagttgacttccttgtgtcatgacctcaggaaataaatttccttgactttataaaagccaaaaaaaaaaaaaaaaaaaaaaaaaa

SEQ ID NO: 4178 - DNA, 2412 bp, Rattus norvegicus
  Genbank Accession No. U93692
agagctgttggtccaagatggcggctgccgcggggcctgtgggcgatggggagctgtggcagagctggcttcctaaccacgtcgtgttcttgcgactccgcgaaggtctgaaaaaccagagtccagccgaagcggataaaccagcgacttcgacttcaccttcatgcccgcctctgccgccgcatttgccgacgagaaacctggtcttcggcctcggaggggaactgttcctgtgggacgcagaaggcagtgcctttttggtggttcgccttcgaggccccagtggtggcagcgtggagccccctctctcccagtatcagagattactttgcattaatccacccttgtttgaaattcatcaagtcttgttaagtccaacacaacatcatgtagcacttataggaacaaaaggacttatggcattagaattacctcagagatgggggaaggattctgaatttgaaggtgggaaagcaactgtgaattgtagcaccatcccgattgctgagagatttttcaccagttctacctctctgactctgaagcatgctgcatggtatcccagtgagatgctggatccccacatagtgctgttgacgtcagacaatgtgataagaatttactctctgcgtgagcctcagacaccaactaaggtgattgtactttcggaagcagaagaggaaagtttaatactcaataaaggaagagcatacacagcatctctaggagagacggcagtggcgtttgacttcgggcctctggtgaccgtctcaaagaatatgtttgaacagaaagacagagaagcagtggcgtatccactgtacattctgtatgagaacggggagaccttcctcacctacgtcagcctgttacacagcccagggaatattgggaagctgttgggcccactgcctatgcatcctgcagctgaagataactatggttacgatgcctgtgctatactctgtttgccctgtgttcccaacatcttagtcattgcgactgagtcaggaatgctgtaccactgtgttgtactagagggagaagaagatgacgatcaaacgttagaaaaatcctgggatcccagggccgacctcatcccttctctgtacgtgtttgagtgtgttgagttagaacttgccctgaaactggcgtctgcagaggatgatccctttgcttctgacttttcctgtccaattaaactgcatagagatcccaagtgtccttcgagataccactgtagccatgaagctggcgtacacagcgttgggctgacttggattcacaaactgcacaaattccttggatcagatgaagaagacaaggatagtttacaggagctcactgctgagcagaaatgctttgtggagcacattctttgtacaaagccgttgccatgcaggcagccagctccaattcgaggattctggatcgtcccggatatcctggggcccacaatgatctgcatcaccagtacctatgaatgtctcataaggcctttattaagtacagtccacccagcatctcctcccctgctctgcacccgggaagatgctggagtggcagagtctccactgcgcatcctggcggaagccccagactcctttgagaagcatattaaacgaatcctgcagcgcagcgccgccaacccggcacttctcaagtcatctgagaaggacttggctccccctcccgaggagtgtcttcagctgatcagcagggccacccaggtgttccgagaacagtacatcctcaagcaggacctggccaaggaggagattcagcggagggtcaaattattatgtgaccagaagaggaagcaactagaagatctcaattactgtcgagaggagagaaaaagtctccgggaaatggccgagcgcttagctgacaaatatgaagaagccaaagaaaaacaagaagatatcatgaacaggatgaaaaaagtgcttcacagttttcacactcagctcccagtcctctcggacagtgagagagacatgaagaaagagctacagctgatacctgaccaacttcgacatctaggcaatgccatcaaacaggttactatgaaaaaagattatcaacagcgaaagatggaaaaagtgctgagtcctcagaaacccaccattactctcagtgcctaccagcgaaagtgcattcagtccatcctgaaagaagagggtgaacacatacgagaaatggtgaagcaaatcaatgatatccgaaatcatgtcaacttctgacaccacctgaagttaaggacagctgaaggcttacaagcccgtgctgcagaacaagcaggcagcataatctaatttataaagacgaatttggataaactatggtgtggttattcttttgttattccttttgttttataatacttgaataaatttttattcaaaattt

SEQ ID NO: 4179 - DNA, 1053 bp, Rattus norvegicus
  Genbank Accession No. U94856
ggactggtgttggcactttacaagaaccatcggtcttcctatcaaacaagattaaatgctttccgtgaagtaacaccggtagatcttcctaactgtactttagttaaaggaatcgaagcgggtgctgaagacttagagattctgcctaatggactaactttctttagcacatttttaaagtatcctggaataaaaagtttcgatcccagtaagcctggaaaaatacttctgatggacttgaatgagaaggagccagcagtgtcagaattagcaattatgggaaatacgttggatatgtcttcatttaacccacatgggattagcacattcatagatgaagataacactgtgtacctactggtggtaagccacccagactcctcgtccaccgtggaggtgtttaaatttcaagaagaggaaagatcacttttgcatctgaaaaccatcacccatgaacttctgcctagcatcaacgatatagctgctgttggacctgagagcttctatgccacaaatgatcactattttgctgacccatacttacggtcctgggaaatgtacttgggcctgtcatggtccaatgttgtatactacagtccagataaagtccgagtggtagcagatggatttgatttcgctaatggcattggcatttcccttgatggcaagtatgtctatatcgctgaattgctggctcacaagattcacgtgtatgaaaagcatgctaattggactttaacgccattgaaggtcctcagctttgacacccttgtggataacatctctgtggatcctgtgacaggggacctctgggttggatgccatcccaatgggatgaggatttttttctatgactcggagaatcctcctggctcagaggtgcttcggatccagagcattttatccgaagaccccaaagtaactgtagtttatgcagagaatggcacggtgttgcaaggtacgacagtcgctgctgtgtacaaaggaaaactgctgattggaacggtgttccacagagctctttgttgttacctgtgacaagctggctacacc

SEQ ID NO: 4180 - DNA, 1047 bp, Rattus norvegicus
  Genbank Accession No. U96490
tttgggcaggacaaggcaagagaagcggctgtttcagtagtgtttgtacccagaactcagcgaggtctacccttgggtagagcgaacgtccggccatggcttaccactcgggatatggagtccacggttccaagcataggacccgggcagctccaaaccctcctccactcttcgatgatacaagtggtggttattccagccaactaggcggatacccagccccaggagctgatgtagccttcaatgtcaacaacctgcttggagacccagtggccaatatggctatggcccatggcagctccatagcatcccaagggaaggacatagtgcacaaagagctacaccgttttgtgtctataaacaaactcaagtatttttttgctgtggacacagcctatgtagccaagaagctagggctattggtcttcccttacacacatcagaactggaaagtgcagtacagtcatgatgtgcctcttgcccccacggaaagacctcaatgcgcctgacctctatatccccaccatggccttcataacatacgtgctgctggctgggatggcactaggcattcagaaaaggttctccccacagcatgtggggctttgtgagcgagacaggtactggtgtgggtgttaatggagtgttggctctgcttctggcctctacctggccaccgtacgcagtgaactgggcaccttccacctcttggcctagactggctacaagtatgtagggatgatcctcagtgtgctcacagggctagcttttcggcagtgatggctactacgtggccctggcctggacatcgtctgcactcatgtacttcactgtagatctttgcggactgcagcttgggtcctgacagcatggggggcccacccctcggcagcatctccagctgtacctgaccctgggagccgctgcctccaaccccttatgatatactggctgaccttccacctggtccggtgacccctggtcctttggtggcactgagttttccatacattgaagatttggtttccttaaaaaaaaaaaaaaaaa

SEQ ID NO: 4181 - DNA, 769 bp, Rattus norvegicus
  Genbank Accession No. V01216
ctcttcctgggccggtgcctctgagtgtcttcggcatggcgctgcacatggttcttgtcgttttgagcctcctgcccttgttggaagctcagaacccagaacctgccaacatcaccctaggcatacctattaccaatgagaccctgaaatggctctcagacaaatggttttacatgggagcagctttccgagaccccgtgttcaagcaggcagttcaaacgatacagacggaatatttttaccttacccccaacttgataaacgacacaattgaacttcgggagtttcagaccacagacgaccagtgtgtctataacttcacccatctaggagtccagagagagaatgggaccttatccaagtgtgcaggagcagtgaaaatctttgcccatttgatagtgctgaagaaacatgggaccttcatgcttgcctttaacctgacagatgagaaccgggggctgtccttctatgctaaaaagccagacttgtccccagagctgcggaaaatattccagcaggctgtcaaagatgtgggcatggatgaatcagaaatcgtatttgtcgactggacaaaggataagtgcagtgagcagcagaagcagcagctggagctggagaaggagactaagaaggagaccaagaaggatccttaggccaagcatgaactcagctctctgaactccggggactgtccccatgcccactctacccccactcctgtgcacctcgattctattttccacaataataaaggtttggttaaacaatc

SEQ ID NO: 4182 - DNA, 331 bp, Rattus norvegicus
  Genbank Accession No. X02284
ctgcctgaccactaatccattggagacacccacagtcatgtgtacagttgtcttgtatttttttgtttgtttgtttgtttttttagacctgtcatcatggctcaccgatttccagccctcacctcagagcagaagaaggagctctccgagattgcgcagcgcattgttgccaatgggaagggtatcttggctgcagatgagtctgtgggtgagtgtaagaaagtcatgccacacaaggcacaccgtgcttgcaccttggaaaaggcagttagacaatcagtctccttccacacagaggaagtaaaggtttatgtacttagtgagtgcaggc

SEQ ID NO: 4183 - DNA, 557 bp, Rattus norvegicus
  Genbank Accession No. X02291
ctgcagatccttaattcagtcttctcttacgcttggttttcaggccaactgtcaggcagcccaaggacagtatgttcacacgggctcgtcaggcgctgcttccacgcagtcactcttcacagcctcctacacctactagataccgtcacctaccagccagctccagttgtcctaaatattttggttggagacctcaaaggcttcagtcagccctgaaattagatcacatctgattgaacttttgaaaacaccacatactgcgaatcagctgttgaagtgcggagtatgagcacgtcacccagtagtctccgaacacctccagttccccgtgttccagaacatccatccaagagaaggaacgggctttacatggaaggtcagtcttccatgcatacagccactactgagcaaagcagctcggaagggaaggaggagaagggcattttaacaaacatacttaccgggggttggttagagaagaggcacagcagcagaaaaagaaataaaaagtctatgaaccttcagttggtactgtttcactgctctgctctgctcga

SEQ ID NO: 4184 - DNA, 735 bp, Rattus norvegicus
  Genbank Accession No. X02904
acgcagctttgagtccacacctctgtctacgcagcagctatgccgccgtacaccattgtgtacttcccagttcgagggcgctgtgaggccacgcgcatgctgctggctgaccagggccagagctggaaggaggaggtggttaccatagatgtctggcttcaaggctcgctcaagtccacttgtctgtatgggcagctccccaagtttgaagatggagacctcaccctttaccaatctaatgccatcttgaggcacctgggtcgctctttagggctttatgggaaagaccagaaggaggctgccttggtggatatggtgaatgatggggtggaggaccttcgatgcaaatatggtaccctcatctacactaactatgagaatggtaaggatgactatgtgaaggccctgcctgggcatctgaaaccttttgagaccctgctgtcccagaaccagggaggcaaagctttcattgtgggtaaccagatttcctttgcagattacaacttgctggacctgctgctggtccaccaagtcctggcccctggctgcctggacaacttccccctgctctctgcctatgtggctcgcctcagtgcccgccccaagatcaaggcctttctgtcctcccctgaccatttgaaccgtcccatcaacggcaatggtaaacagtagtggacgaagggacaggaactccttgtcccccttttcccagactaataaagtttgtaaggcaga

SEQ ID NO: 4185 - DNA, 3811 bp, Rattus norvegicus
  Genbank Accession No. X03347
cgggctgtattgaaagaccccttcataaggcttagccagctaactgcagtaacgccattttgcaaggcatgggaaaataccagagctgatgttctcagaaaaacaagaacaaggaggtaaagagaggctggaaagtaccgggactagggccaagaacaaatggttcccagaaatagaggctggaaagtaccgggactagggccaaacaggatatctgtggtcaagcactagggccccggcccagggccaagaacagatggttcccagaaatagctaaaacaacaacagtttcaagagacccagaaactgtctcaaggttccccagatgaccggggatcaaccccaagcctcatttaaactaaccaatcagctcgcttctcgcttctgtacccgcgcttattgctgcccagctctataaaaagggtaagaaccccacactcggcgcgccagtcctccgatagactgagtcgcccgggtacccgtgtatccaataaagccttttgctgttgcatccgaatcgtggtctcgctgatccttgggagggtctcctcagagtgattgactgcccagcctgggggtctttcatttgggggctcgtccgggatccggagacccccgcccagggaccaccgacccaccgtcgggaggtaagctggccagcggtcgttttgtctccgtctctgtctttgtgcgtgtgtgtgtgtgccggcatctaatctttgcgcctgcgtctgtatctgtactagttagctaactagatctgtatctggcggttccgtgaaagaactgacgagttcgtattcccggccgcagccctgggagacgtctcagaggcatcgggggccatttttgtggcccaatctgtatctgagaacccgacccgtttcggactctttggagcttctccattgactgaaggatacgtggttctattgggcggcgaggggccgaaacgctcctctcctccatctgaatttttgctttcggttttccgccgaaaccgcgccgcgcgtcttatctgtctcagtgttattttgtcatttgtctgttcgttattgttttggaccgtttctaaaaatatgggacagaccgtaaccactcctttgagtctgaccctagaacactggggagacgtccagcgcattgcgtccaaccagtccgtggacgtcaagaagagacgctgggtcaccttctgttctgccgagtggccaactttcgatgtggggtggccgcaagatggtacttttaatttggacattattttacaggttaaatctaaggtgttctctcccggtccccacggacacccggatcaggtcccatacattgtcacctgggaggctattgcctatgaaccccctccgtgggtcaaaccttttgtctctcccaaactctccccctctccaaccgctcccatcctcccatccggtccttcgacccaacctccgccccgatctgccctttaccctgcccttaccccctctataaaacccagaccttctaaacctcaggttctctccgatgacggcggacctctcattgaccttctcacagaagaccctccgccgtacggagaacagggaccgtcctcctctgacggggatggcgacagagaagaggccacctccacttctgagattcctgccccctctcccatggtgtctcgcctgcggggcaaaagagacccccccgcggcagattccactacctctcgggctttcccactccgtttggggggtaatggtcagaaaaataataacccttccttttctgaagatccaggtaaattgactgccttaatcgagtctgtcctcaccacccaccagcctacctgggacgactgtcagcagttgctggggactctgctgacaggagaagaaaagcagcgggtgctcctggaggccagaaaggcagtccggggcaacgatgggcgccccacccagatgcctaatgaagtcaatgccgccttccccctcgaacgtcccgattgggattatacaactcctgaagacagcctttcctactaccattccccagccgactccttctccagcatgggctctcctgtcaacacacaggacttttgcgcagatctgtccgtctctagtgccaactttatccccacggagacagccatctccaccagccctgacctgcagtggctggtgcagcccactctggtctcctccgtggccccatcgcagaccagagcgccccatccttacggactccccacccagtctgctggggcttacgccagagcgggaatggtgaagaccgtgtcaggaggcagagcgcagagcatcggcagaaggggcaaagtagagcagctatctcctgaagaggaagtgaaacggagaatccgaagagaacggaataagatggctgcagccaagtgccggaatcggaggagggagctgacagatacactccaagcggagacagatcaacttgaagatgagaagtctgcgttgcagactgagattgccaatctgctgaaagagaaggaaaaactggagtttattttggcagcccaccgacctgcctgcaagatccccgatgaccttggcttcccagaggagatgtctgtggcctccctagatttgactggaggtctgctgccccttctcaacgaccctgagcccaagccatccttggagccagtcaagagcagctttgatgacttcttgtttccggcatcatctggacacagtggctttattagcatggcagggtggcaataggacttagaaattggcattggggcccttcttcttccctaaggtgggcacaacattgacaaagcgccggttgtactgcattcgcctcttggcccggcctgtcttcttcttcttcttttcctgtttggccaccttgggagtctgacctctcacttttccagcccgagccaggaaaccgtgaactttacctcccagcatgcggcctgctacttccagagtggtcagggcctctacgccacactggcctagggtggcctcatcctcctgcggcgagcctgccagaagcacgacttgatcgtcgggggcaatgccttccagggaggtcacatgatctttgatctgggcgaccgtcccctggccggtcacctcgagggtgtgtagttcctgggcgcggacaaagagctgcatgttggctacttaagacagtaaaagattaaaaatcacgtgaataaaagattttattcagtttacagaaagaggggggaatgaaagaccccttcataaggcttagccagctaactgcagtaacgccattttgcaaggcatgggaaaataccagagctgatgttctcagaaaaacaagaacaaggaggtaaagagaggctggaaagtaccgggactagggccaagaacaaatggttcccagaaatagaggctggaaagtaccgggactagggccaaacaggatatctgtggtcaagcactagggccccggccagggccaagaacagatggttcccagaaatagctaaaacaacaacagtttcaagagacccagaaactgtctcaaggttccccagatgaccggggatcaaccccaagcctcatttaaactaaccaatcagctcgcttctcgcttctgtacccgcgcttattgctgcccagctctataaaaagggtaagaaccccacactcggcgcgccagtcctccgatagactgagtcgcccgggtacccgtgtatccaataaagccttttgctgttgcatccgaatcgtggtctcgctgatccttgggagggtctcctcagagtgattgactgcccagcctgggggtctttcagtatgtaata

SEQ ID NO: 4186 - DNA, 1592 bp, Rattus norvegicus
  Genbank Accession No. X03369
ccaacaccatgcgcgagatcgtgcacatccaggcgggccaatgcggcaaccagatcggccctaagttttgggaggtgataagcgatgagcatggcatcgacccgacgggcagctaccatggcgacagtgacttgcagctggagagaatcaatgtgtactacaatgaagctgctggcaacaaatatgtacctcgggccatcctagtggacctggagccaggcaccatggactcagtgaggtcgggaccattcggccagatcttcaggccagacaactttgtgttcggtcagagtggtgcaggaaataactgggcaaagggccactacacagagggtgccgagctggtggactctgtcctggatgtggtcaggaaggagtcagaaagctgtgactgtctccagggctttcagctgacccactcattggggggaggcactggctcaggcatggggaccctgctcatcagcaagatcagagaagagtacccagaccgcatcatgaacaccttcagcgtcatgccctcacccaaggtgtcggacactgtggtggagccctataatgccaccctttccgtgcaccagctggtagagaacacagacgaaacctactgcatcgacaacgaggctctgtatgacatctgcttccgcaccctgaagctgaccacacccacctatggcgatctcaaccacctggtgtcagccaccatgagtggagtgaccacctgcctgcgcttccctggccagctgaacgcagacctgcgcaagctggctgtgaacatggtgcctttcccacgcctgcacttcttcatgccaggcttcgcacctctgaccagcaggggcagccagcagtaccgagccctgacagtgcccgagctcacccagcagatgttcgactccaagaacatgatggctgcctgcgacccacgccatggccgctacctgaccgtagccgccattttccggggccgcatgtccatgaaggaggtggatgagcagatgctcaacgtgcagaacaagaacagcagctacttcgtggaatggatccccaacaatgtgaagacggccgtgtgtgacatccctcctcgtggcctcaagatgtccgccaccttcattggcaacagcaccgccatccaagagctgttcaagcgcatctcggagcagttcactgccatgttccggcgcaaggccttcctgcactggtacacgggcgagggcatggacgagatggagttcaccgaggcggagagcaacatgaatgagctggtgtctgagtaccagcagtaccaggatgccacggctgatgagcagggcgagttcgaggaggaggagggtgaggatgaggcttgagttcccaggccaagcaggttagggaaagctgaggcgaaaggagggggtgggggtcttaatctgtgaaaataccttggcagttggaagaaggagaatggtcttaggtttgtgctgggtctctggtgctcttactgttgcctctcacttttttctctttttgtaatatcgatgacgtgatgtgatgcttgagatctttctgaactcctgttgtgatggctgaaatcgcctgaacctttgtgtcctaaa

SEQ ID NO: 4187 - DNA, 413 bp, Rattus norvegicus
  Genbank Accession No. X03468
atgaagctgcttgcaatggttgcactgctggtcaccatctgtagcctagaaggagctttggttcggagacaggcagcggagacggatgtgcagaccctgttcagccagtatcttcagagtttaactgactatggcaaggatttgatggagaaggcccagccctcagagattcagaaccaagccaaggcttactttcagaatgcacaggagagactgacaccctttgtccagagaactgggacgaatctgatggacttcttaagccgtttaatgagccccgaggagaaaccagctcctgccgctaagtgaggtgtgtcaggactcgtcttcctaccccagctgacccactggccatcgctggagtccctctcccgactttctgcttgtcttttccaataaattcggaaggagtt

SEQ ID NO: 4188 - DNA, 1485 bp, Rattus norvegicus
  Genbank Accession No. X04070
cgcagtgccagggaggtgtgaatgaggcaggatgaactggacaggtctatacaccttgctcagtggcgtgaatcggcattctacagccattggccgagtatggctgtccgtcatctttatcttcagaatcatggtgctggtggtggctgcagagagcgtgtggggtgatgagaagtcttctttcatctgtaacaccctccagccgggctgtaacagcgtctgctatgaccattttttccccatctcccatgtgcgcctgtggtccctgcaactcatcttggtttccaccccagctctcctcgtggcaatgcacgtggctcaccaacaacacatagaaaagaaaatgctacggcttgaggggcacggggacccccttcacctggaagaggtaaagaggcacaaggtgcacatctcagggacactgtggtggacctatgtcatcagtgtggtgttccggctgctgtttgaggctgtcttcatgtatgtcttctatctgctctacccgggctatgccatggtgcggctggtcaagtgtgaggccttcccctgccccaacacggtggactgcttcgtgtcccgccccactgagaaaaccgtcttcactgtctttatgctcgccgcctccggcatctgcattatcctcaacgtggcggaggtggtgtacctcatcatccgggcctgtgcccgccgtgctcagcgccgctccaatccgccctcccgcaagggctcgggcttcggccaccgcctctcacctgaatacaagcagaatgagatcaacaagctgctgagcgagcaggatggctctctgaaagacatactgcgccgcagtcctggcactggggccgggctggctgagaagagcgaccgatgctcagcctgctgatgccgagtaccaggcaacctcccatccaacccctccctcaccccacccaggcctgcccctccttctcctatgctggtgagcaggcctctgcctcctagggattactccatcaaaccttccctccctccctactccccttcctcagagagtcttctgtcaaagacctggccggcttgggagtggggagccacttctgcaccagggctcaaggttattgagggtgtgggcaattctttctgcctataccctttcctcttccctctccctgagatgagggatgagatgttctgaaggtgtttccaattaggaaacgtaatcttaacccccatgctgtcaggtaccccactttgggagtcatgtcagtggggagggctgtgagcaagcagagtggaggaggggctctgcactgtggatggagaagggaggggagcttgccttgctgcctgctacaaggaaaaggaggacacatctagggtgggggagttctggagggagaagcaggcagataaatcagagtgggggttggtcagggctgcccccagtccccagttcccaaggcctctctctctgaaaatgttacacattaaacaggattttacagt

SEQ ID NO: 4189 - DNA, 1121 bp, Rattus norvegicus
  Genbank Accession No. X05472
aagatgaactctcaatcctaaatatctatgccccaaatacaagggcacctacatacgtaaaagaaaccttactaaagctcaaagcacacattgcacctcacacaataataatgggagatttcaacacaccactctcatcaatggacagatcatggaaacagatattaagcaatgatgtcgacagactaagagaagccatgagccaaatgggcttaacggatatttatagaacattctatcctaaagcaaaaggatataccttcttctcagctcctcatggtactttctccaaaattgaccatataattggtcaaaaaacgggcctcaacaggtacagaaagatagaaataatcccatgcgtgctatcggaccaccacggcctaaaactggtcttcaataacaataagggaagaatgcccacatagacgtggaaattgaacaatgctatactcaatgataacctggtcaaggaagaaataaagaaagaaattaaaaactttttagaatttaatgaaaatgaagatacaacatacccaaacttatgggacacaatgaaagctgtgctaagaggaaaactcatagcgctgagtgcctgcagaaagaaacaggaaagagcatatgtcagcagcttgacagcacacctaaaagctctagaacaaaaagaagcaaatacacccaggaggagtagaaggcaggaaataatcaaactcagagctgaaataaaccaagtagaaacaaaaagtaccatagaaagaatcaacagaaccaaaagttggttctttgagaaaatcaacaagatagataaacccttagccacactaacgagaggacacagagagtgcgtccaaattaacaaaatcagaaatgaaaagggagacataactacagattcagaggaaattcaaaaaatcatcagatcttactataaaaacctatattcaaaaaaacttgaaaattttcaggaaatggacaatttcctagacagataccaggtattgaagttaaatcaggaacagataaaccagttaaacaaccccataactcctaaggaaatagaagcagtcattaaaggtctcccaaccaaaaagagcccaggtccagacgggtttagtgcagaattc

SEQ ID NO: 4190 - DNA, 958 bp, Rattus norvegicus
  Genbank Accession No. X06107
cgaatgttcccccagctgtttcctgtctacagtgtctgtgttttgtagataaatgtgaggattttctctaaatccctcttctgcttgctaaatctcactgtcgctgctaaattcagaccagatagagcctgcgcaatcgaaataaagtcctcaaaattgaaatgtgactttgctctaacatctcccatctctctggattctttttgcctcattattcctgcccaccaattcatttccagactttgtacttcagaagcgatggggaaaatcagcagtcttccaactcaattatttaagatctgcctctgtgacttcttgaagataaagatacacatcatgtcgtcttcacatctcttctacctggcactctgcttgctcacctttaccagctcggccacagccggaccagagaccctttgcggggctgagctggtggacgctcttcagttcgtgtgtggaccaaggggcttttacttcaacaagcccacaggctatggctccagcattcggagggcaccacagacgggcattgtggatgagtgttgcttccggagctgtgatctgaggaggctggagatgtactgtgctccgctgaagcctacaaagtcagctcgttccatccgggcccagcgccacactgacatgcccaagactcagaagtcccagcccctatcgacacacaagaaaaggaagctgcaaaggagaaggaaaggaagtacacttgaagaacacaagtagaggaagtgcaggaaacaagacctacagaatgtaggaggagcctcccgaggaacagaaaatgccacgtcaccgcaagatcctttgctgcttgagcaacctgcaaaacatcggaacacctgccaaatatcaataatgagttcaataccatttcagagatgggcatttccctcaatgaaatacacaagtaaacattccgacattgtctttaggagtgtttgtt

SEQ ID NO: 4191 - DNA, 2116 bp, Rattus norvegicus
  Genbank Accession No. X06769
cgcaactgagaagactggatagagccggcggagccgcgaacgagcagtgaccgcgctcccacccagctctgctctgcagctcccaccagtgtctacccctggacccctcgccgagctttgcccaaaccacgaccatgatgttctcgggtttcaacgcggactacgaggcgtcatcctcccgctgcagtagcgcctccccggccggggacagcctttcctactaccattccccagccgactccttctccagcatgggctcccctgtcaacacacaggacttttgcgcagatctgtccgtctctagtgccaactttatccccacggtgacagccatctccaccagcccagacctgcagtggctggtgcagcccactctggtctcctccgtggccccatcgcagaccagagcgccccatccttacggactccccaccccgtcgaccggggcttacgccagagcgggagtggtgaagaccatgtcaggcggcagagcgcagagcatcggcagaaggggcaaagtagagcagctatctcctgaagaggaagagaaacggagaatccgaagggaaaggaataagatggctgcagccaagtgccggaatcggaggagggagctgacagatacgctccaagcggagacagatcaacttgaagacgagaagtctgcgttgcagaccgagattgccaatctactgaaagagaaggaaaaactggagtttattttggcagcccaccgacctgcctgcaagatccccaatgacctgggcttcccagaggagatgtctgtgacctccctggacttgactgggggtctgcctgaggctaccaccccagagtctgaggaggccttcaccctgcctcttctcaatgaccctgagcccaagccatccttggagccggtcaagaacattagcaacatggagctgaaggctgaaccctttgatgacttcttgtttccggcatcatctaggcccagtggctcggagactgcccgctctgtgccagatgtggacctgtctggttccttctatgcagcagactgggagcctctgcacagcagttccctggggatggggcccatggtcacagagctggagcccctgtgcactcccgttgtcacctgcactcccagctgcactacctatacgtcttcctttgtcttcacctaccccgaggctgactccttccctagctgcgcagctgcccaccgaaagggcagcagcagcaacgagccctcctctgactcactgagctcgcccacactgctagccctgtgagcagtcagagaaggcagggcagccggcactgactgagctggtgcattacagagaggagaaacacgtcttccctcgaggggttcccgtagacctagggaggaccttatctgtgcgtgaaacacaccaagctgtggacctcaaggacttgaaagcatccacatctggactccagtcctcacctcttccggagatgtagcaaaaaaacaaaaaaacaaaacaaaaaaaaaacaaaacaaaaaatcaaaagcaaccgcatggagtgtattgtttgtagtgacacctgagagctggtagttagtagcatgtgagccaggcctgggtctgtgtctcttttctctttctccttagtcttctcatagcattaactaatctgttgggttcattattggaattaacctggtgctggatatttttcggattgtatctagtgcagctgattttaacaatacctactgtgttcctggcaatagtgtgttccaatttagaaatgaccaatattaaactaagaaaagatagaactttattttccggtagatagaaataaatcgctatatccacgtactgtagctcttcagcgtccatgttcattgtcatgtaactgatcatgcattgttgaggtggtctgaatgttctgacattaacagttttccatgaaaacgttttattgtgttttcaatttatttattaagatggattctcagatatttatatttttattttatttttttctatcctgaggtctttcgacatgtggaaagtgaatttgaatgaaaaaattttaagcattgtttgcttattgttccaagacattgtcaataaaagcatttaagttgaatgcg

SEQ ID NO: 4192 - DNA, 2134 bp, Rattus norvegicus
  Genbank Accession No. X07259
cgctgcaccatgagcgtctctgcactgagctccacccgcttcacgggcagcatctctggcttcctccaagtggcctccgtgcttggtctgcttctgctgctggtcaaagcagtccagttctacctgcaaaggcaatggctactcaaggctttccagcagttcccatcacctcccttccactggttctttgggcacaagcagtttcaaggtgacaaagaactacagcaaattatgacatgtgtggagaatttcccaagtgcctttcctcgatggttctggggaagcaaagcctacttaattgtctatgaccctgactacatgaaggtgattctcgggcgatcagatccaaaggccaatggcgtctacagattgctagctccttggatcggatatggtttgctcttgctgaatggacaaccgtggttccagcaccggcgaatgctaaccccagccttccactatgacattctgaaaccctatgtaaaaaacatggctgactccattcgactgatgctagacaaatgggaacagctggcaggtcaagactcctctatagaaatctttcaacatatctccttaatgaccctagacactgtcatgaagtgtgccttcagccacaatggcagtgttcaggtggatggaaattacaagagctatatccaggccattgggaacttgaatgacctctttcactcccgtgtgaggaacatctttcatcagaatgataccatctataatttttcttccaatggccacttgttcaaccgtgcttgtcaacttgcccatgatcacacagatggtgtgatcaagctaaggaaggatcagctgcagaatgcgggagagctggaaaaggtcaagaagaaaagacgtttggattttctggacatcctcttacttgccagaatggagaatggggacagcttgtctgacaaggacctacgtgctgaggtggacacatttatgttcgagggtcatgacaccacagccagtggagtctcctggatcttctatgctctggccacacaccctaagcaccaacaaagatgcagagaggaagttcagagtgtcctgggggatgggtcctccattacctgggatcacctggaccagattccctacaccaccatgtgtatcaaggaggccctgaggctttacccacctgttccaggcattgtcagagaactcagcacatctgtcaccttccctgatgggcgctctttacccaagggtatccaagtcacactctccatttatggtctccaccacaacccgaaggtgtggccaaacccagaggtgtttgacccttccaggtttgcaccagactctccccgacacagccactcattcctgcccttctcaggaggagcgaggaactgcattgggaaacaatttgctatgagtgagatgaaggtgattgtggccctgaccctgctccgctttgagctactgccagatcccaccaaggtccccatccccttaccacgacttgtgctgaagtccaaaaatgggatctacctgtatctcaagaagctccactaattccggacttcttcattataccaataatcaacggtcacaaccttgatggtcgggaataacaggacgttattatcttacagttgtggagctccgaaatctgaaatgagtttcactggcagaaagctgagttggtggtgtgactagccttcttcagaagagtgcttcagagagtcctctcctcctctcttcagtacagatcacccttctcagcactggaatattcctctgctttaaagccagcacccttcccataccccctcttctaaaagccttcccttttacaaatgttcttatgacatcatcaagaccactgaaaaactccaagataatttcccatctcaatattccttactccatctaacctactaagtcccttttgaattatgaggaataattcaatttgttccatgggctccaaaactcaaggcctgagcattattgtgaaacctttattcagcctaatatcatcttcacaagactgttacctggtacgttcatctaaatctcccctgcatagtctctctacctgactattcctcacacaagtttctttaccttccctcctttctccaataaagtgtccagtgtcctgcac

SEQ ID NO: 4193 - DNA, 1857 bp, Rattus norvegicus
  Genbank Accession No. X07686
aagcttaaaactttaaaatcgtatgttcttaagttaccaaatattttctattacttcatctctcttgtcttgatcacgcagcaaacttgttttggcacaaattaccacatgaattctagagcccagtttcatatgctattcacagaatgatgtcatggtaatgatgccagccacagacagtgggcttccaacctcaataaattgtacttttcttatgttgtctttttttgtaggaaagacattaaacccttataatccaaaagatcagaagcagggagctcatagccaatctaagtgctacctgcaattctatcaattagaaatgggaccaatctaaggtcactccagggcatctccagggaaagggtacatgtttaatgtcaccaagctaccagcgagtagttcctgggtgcagattcctttagtcatgcacagtagattaattccaagaatgacagtcaagctcctgggcagcaccccgtgagcaaacttgagccttgggaccacaggtaagaccaacttttctgctgcaagagacctgcctggtgatctcgggacatacagaggcagaattcctctaggaccgggcacctcctgtgtttaccgggagtcccacacccgcggatcccggcccgcagcagctctttgctcccagacaccgtgggagagagaccccaccacctggtcaggtgggcactcctgaggctgcagagcggaatagaccaccaacactgcccacccctccctacatccctggcccaagaggaaactgtataaggcctctgggttcccgtgggggagggcccaggagtggcagtacctcttcctctgagacaccgccggaacctgaaggaaacagaccggataaacagttctctgcacccaaatcccgtgggagggagagctaaaccctcagagaggcagacatgcctgggaacccagaagagactgcagtctgcacacacatctcggatgccagaggaaaacaccaaacgccatctggaaccctggtgcactgaagttcctggaaacagcggcgcagatcttcctggttgctgcagccgcagagagctcgagggcagcaccccgagagcgaacttgagcctcgggaccacagggaagaccaacttttctgctgcaagtgacctgtctggtgaactcaagacagaggcccacaggaacagctgaagacctgtagagaggaaaaactacacgcccgaaagcagaacactctgtcgccataacaggctgaaagaaaacaggaaaacaggtctacagcactcctgacacacaggcttatagggcagtctagccactgtcagaaatagcagaacaaagtaacactagagataatctgatggcaagaggcaagcgcaggaacccaagcaacagaaaccaagactacatggcaccatcggagcccaattctcccaccaaaacaaacatggaatatccaaacacaccagaaaagcaagatctagtttcaaaatcatatttgatcatgatgctggaggacttcaagaaagacgtgaagaactcccttagagaacaagtagaagactacagagaggaatcacaaaaatgcctgaaagaattccaggaaaacataattaaacaagtagaagcccatagagaggagtcacaaaaatccctgaaagaattccaggaaatcataaataaacaagtagaagcccatagagaggagtcacaaaaatccctgaaagaattccaggaaaacacaatcaaacagttgaaggaattaaaaatggaaatagaagcaatcaagaaagaacacatggaaacaaccctggatatagaaaaccaaaagaagagacaaggagctgtagatacaagctt

SEQ ID NO: 4194 - DNA, 1495 bp, Rattus norvegicus
  Genbank Accession No. X12459
caatccaagacaagatgtccagcaagggctctgtggttctggcctacagtggtggtctggacacctcctgcatcctcgtgtggctgaaggaacaaggctatgatgtcatcgcctacctggccaacattggccagaaggaagactttgaggaagccaggaagaaggcactgaagcttggggccaaaaaggtgttcattgaggatgtaagcaaggagtttgtggaagagttcatctggcctgctgtccagtccagtgcactctatgaggaccgctatctcctaggcacctctctcgccaggccttgcatagctcgcaaacaagtggaaattgcccagcgcgaaggggccaagtatgtgtctcacggcgccacggggaagggcaatgaccaggtccgctttgagctcacctgctactcgttagcaccccagattaaggtcatcgccccctggaggatgcccgagttttacaaccggttcaagggccgaaatgatttgatggaatacgcaaagcaacatggaatccccatccctgtcacccccaagagcccctggagcatggatgagaaccttatgcacatcagctacgaggctggaatcctggaaaaccccaagaaccaagcacctccaggtctctacacaaaaactcaggaccctgccaaagcacccaacaccccagatgtccttgagatagaattcaaaaaaggggtccctgtgaaggtgaccaacgtcaaagatggcactacccacagcacatccttggacctcttcatgtacctgaatgaagttgcgggcaagcatggagtagggcgcattgacatcgtggagaaccgcttcattggaatgaagtcccggggtatctacgagaccccagcagggaccatcctttaccacgctcatttagacatagaggccttcaccatggatcgggaagtacgcaaaatcaagcagggcctgggcctcaaattcgcagagctcgtatacaccggtttctggcacagccctgaatgtgaatttgttcgccactgcatcgacaagtcccaggaacgggtggaaggaaaggtgcaggtatctgtcttcaagggccaggtgtacatccttggccgggagtctccactttcactatacaatgaagagctggtgagcatgaacgtacagggtgactatgaacccattgatgccaccggcttcatcaatatcaactcgctcaggctgaaggagtaccatcgccttcagagcaaggtcaccgccaaatagaccgtgacaaagaggccgggcctccccgctctgcagctctcccaggctccagcattaattgttgtgataaatttgtaattgtagcttgttctcctaccacctgactggggctgctgtgccccccctcacctcccccccacccacaggctttgttccctggtcccctatagcctacaaaagtggtcatcgaagggaagggggggtggcaggcagctgcagaaagcgcgtaaaatgacaattaa

SEQ ID NO: 4195 - DNA, 3037 bp, Rattus norvegicus
  Genbank Accession No. X13722
ttgacccagtgcggcgtaggattgcagcccgcatacctggggcttgccacccaggttttgcagctgagacaccgtgggacccgtgatcctgtgtttgcagcgggaacatttcgggtctgtgatccgagtggggacgcgacgcagaggctgaggatgagcaccgcggatctgatgctacgctgggccatcgccctgctcctggctgctgctggagttgcagcagaagattcatgtggcaagaacgagttccagtgtagagacggaaaatgcatcgtcagcaagtgggtgtgtgacggcagccgcgagtgcccggatggctccgatgagtcccctgagacatgcatgtctgtcacctgtcgatccggtgagttcagctgtggaggccgcgtcagccgatgcattcctgactcctggagatgtgatgggcggaccgactgtgaaaatggctcggatgaactagactgctcccccaagacgtgctccctggatgagttccgctgccaggatggcaagtgcatctcccggcagtttgtgtgtgaccaagactgggattgcctggatggctctgacgaggcccactgtgcggccaccacttgtggccctgctcacttccgctgcaactcctcttcctgcatccccagcctgtgggcctgcgacggggaccgggactgtgacgatggctccgatgagtggccgcagaactgcggggccgaagacacggccgctgaggtggtcagcagcccctgctcctccctcgagttccactgtggcagtagtgagtgtatccatcgcagctgggtctgtgacggtgcggctgactgcaaggacaagtcggacgaggagaactgcgcggtgaccacctgccgacctgacgaattccagtgtgcagatggctcctgtattcacggtagccgccagtgtgaccgtgaacatgactgcaaagacatgagcgacgagcttggctgcatcaatgtgacccagtgcgatggccctaacaaattcaagtgccacagtggggagtgcatcagcttggacaaggtgtgcaactccgcccgggactgtcgtgactggtcggatgagcccatcaaggagtgcaagaccaacgagtgcttggacaacaatggtggctgttcccacatctgcaaggacctcaagattggctatgagtgcctatgtcccagcggtttccggttggtggacggccaccagtgtgaagatattgacgagtgtcaggagccagacacctgcagccagctctgtgtgaacctggagggcagcttcaagtgcgagtgtcgggccggcttccacatggaccctcacaccagggtctgcaaggctgtgggttccatagggtttctgctcttcaccaaccgccatgaggtacgtaagatgaccctggaccgcagcgagtataccagcctgatccccaacctgaagaatgtggtggcgctggacactgaggtggccaacaatagaatttactggtctgacctgtcccagagaaagatctacagcgccgtgatggaccagggcaccagcttgtcctatgatgccatcatcagtggggacctgcacgcccctgacgggctggcggtagactggatccatggcaacatctactggacggattcagttccgggcactgtttccgtggctgacaccaagggtgtcaggaggagaactctgttccgagagaaagggtccagacccagagccatcgtagtggaccctgtgcatggcttcatgtactggacagattgggggacacctgccaagatcaagaaagggggtttgaatggtgtagacatctactctctggtgaccgaggacatccagtggccaaatggcatcacactagatcttcccagtggccgcctctattgggttgattccaaactccactccatctccagcatcgatgtcaatgggggtggtcggaaaaccattttggaggatgagaagcagctagctcaccccttctccttggccatctatgaggacaaagtgtattggacagatgtcttaaatgaagccattttcagtgccaaccgcctcacgggttcagatgtgaatttggtggctaaaaacctcatgtccccggaggacattgtcctgtttcacaacgtcacgcagcctagaggggtaaactggtgtgaggcaacggttctccccaacggtggctgccagtacatgtgcctgcctgcccctcagatcagtgcccactcacccaagttcacctgcgcttgccctgatggtatgctactggccaaggacatgaggagctgcctcccagaagtcgacactgtaccgaccacccaggggacatccaccattgggcctgtggtcaccacatcagctgctgtgtcactgaagcgcaaggaggatccctcagctactaggcacaaggaggatccctcagctactaggcacaatgaggatccctcagctaccagcacctctaggcagcctggggataccccagagctcagcacagtggagtcggtgacagtgtcctcccaagtccaaggtgacatggctggcagaggggacgaggtgcagcggcacggtgtggggttcttgtccatcttcctccccattgcactggtggccctccttgtcttcggagccatcctcctgtggaggaactggcggctgaggaacattaacagcataaactttgacaacccagtctaccagaagaccacggaggacgagatccacatttgccgcagccaggatggctatacctacccctcgagacagatggtcagcctggaggatgatgtggcatgaacagctgaggggagccatctctttccgggatccgctgccacccttaggcaggaaggacgctttctcacacctccccgccctgcactggtccttccacctcagtggtctctgtgttgctcaaagcaagataagagcaaaactgggctggggccaagctcagcggcctgtctgccctgggtcctgttttatatatttattgtctggggacagaaaaggctactggccatgctccagatgggaattc

SEQ ID NO: 4196 - DNA, 654 bp, Rattus norvegicus
  Genbank Accession No. X13905
ccgctgccgccatgaaccccgaatatgactacctgtttaagctgcttttgattggtgactcgggcgtgggcaagtcatgcctgcttctgcggtttgctgatgacacgtacacagagagctacatcagcaccattggggtggacttcaagattcgaaccattgaactggatggcaaaaccatcaaactacagatttgggacacagctggtcaggaacggttcaggacagtcacttccagctactatcggggtgctcatggcatcattgtggtgtatgacgtcactgaccaggaatcctacgctaatgtgaaacagtggctgcaggaaatagatcgctacgccagtgagaatgtcaataaactgctggtaggcaacaagagtgacctcaccaccaagaaggtcgtggacaataccacagccaaggaatttgcagactctctgggtgtccccttcctggagacaagtgccaagaatgccaccaatgttgaacaggcattcatgacaatggctgcagagatcaaaaaacggatggggccaggagcagcatctgggggtgaacggcccaacctgaagatcgacagcactcctgtgaaatctgctagtggtggctgctgctaggggggggtacttggggagggcacttctccagatgatg

SEQ ID NO: 4197 - DNA, 591 bp, Rattus norvegicus
  Genbank Accession No. X14181
cttttgtgagtggcagtgaacgagcacgcactgctatgaaggcgtcgggcacgcttcgggagtacaaggtggtggggcgttgcttgccaaccccaaaatgccacacaccgccactgtaccgaatgcgaatctttgcacccaaccatgtggtggccaagtcccgcttctggtactttgtgtcgcagctgaagaagatgaagaagtcatccggggaaattgtgtactgtgggcaggtgtttgagaagtcacccctgcgtgtgaagaacttcggcatctggctgcgctatgattcccgaagtggcactcacaacatgtaccgagagtaccgggacctgaccactgccggcgcggtcacacagtgctaccgagacatgggtgcccgacaccgtgcccgtgcgcactccatccagatcatgaaggtggaagagattgcagctggcaagtgccgccggccagctgtcaagcagttccacgactccaagatcaagttcccattgccccaccgtgtgttgcggcgccagcacaaaccacgcttcaccaccaagaggccaaacaccttcttctagacaccagagacccactgaataaaag

SEQ ID NO: 4198 - DNA, 907 bp, Rattus norvegicus
  Genbank Accession No. X14210
tctttccgttcccagcgcagcatggctcgtggtcccaagaaacatctgaagcgcgtagcggctccaaaacactggatgctggataagctgactggcgtgtttgctcctcgtccatccactggtccacacaaactgagggaatgcctgcctctgatcattttcctaaggaacagacttaagtatgccctgactggagatgaagtaaaaaagatttgcatgcagcgattcattaagattgatgggaaagtcaggaccgatataacctaccctgctgggtttatggatgtcatcagcattgacaagactggagagaacttccgtctgatctatgacaccaagggtcgctttgctgtccatcgaattacacctgaggaggccaagtacaagttgtgcaaagtgagaaagatctttgtgggcacaaaaggaatcccacatctggtgacccatgatgcccgtactattcgataccctgatcccctcatcaaggtgaatgacaccattcagattgatttggaaacaggcaagataactgatttcatcaagttcgacactgggaacctgtgtatggtgactggaggtgctaacttggggagaattggtgtaatcaccaatagggagagacatcctggctcttttgatgtggttcatgtgaaagatgccaacggcaacagctttgccactcgtctttccaacatttttgttattggcaagggcaacaaaccgtggatttctcttccccgaggaaaaggaatccgccttaccattgctgaagagagagacaagaggctagcagccaaacagagcagtgggtgaaatggtctctaggagacatgctggaggagtatttgtacctcaacacaacaagcctttctaagcaacatgctagattaaacagcatgatgaaatc

SEQ ID NO: 4199 - DNA, 1216 bp, Rattus norvegicus
  Genbank Accession No. X14232
gcccagggtgggaggaagggcggtaatctctaggaagcagaaggcaggtttgcagaggacgctggataggagatgaggtgggggaaaccaaggcctgggcttcccgcagctgcagcaaggttttggtgcttaccacagcagcaggaatgcattgagggatgtgacagtggaacgcaggtggcagtgatactcactgctgctgaaggagcccaaagaaccagcatctgacctgtcttgaacgcaccatcgacagttgctgctgagtcatggccgaaggggagatcacaacctttgcagccctgaccgagaggttcaatctgcctctagggaactacaaaaaacccaaactgctctactgcagcaacgggggccacttcttgaggattcttcccgatggcaccgtggatgggaccagggacaggagcgaccagcacattcagctgcagctcagtgcggaaagcgcgggcgaagtgtatataaagggtacagagactggccagtacttggccatggacaccgaagggcttttatacggctcgcagacaccaaatgaagaatgcctattcctggaaaggctagaagaaaaccattataacacttacacatccaagaagcacgcggagaagaactggtttgtgggcctcaagaagaacgggagttgtaagcgcggtcctcggactcactacggccagaaagccatcttgtttctccccctcccggtatcttctgactaaggagtctgttctgggtgctccctatttttggttgaccctaaaatgttcccttgaccattggctgcgctaaccctcagcccacagagcctgaatttgtaagcagtgcttctaaatagccagttcacttttccgctgagcccttccccaccaccccagcacagtttggaacacggggaccaaattacttctaggggacaactggctggccagtctaggtctgggtttggatatccagatgcttcagggtacctgctacaagttggacctcgtgatacaaagaggggagccatgtgtagcatctggaggggtctaagaagtgggttcttttagtagctgcatgctctttccccttctgagtaatccctggttttgagtacccccaggcacttagcatgactacccttccccctaccagcacctcataaatatcagtaaagaaactgatagtaaaaaaaaaaaaaaaaaaaaaaaaaaaaaaaaaa

SEQ ID NO: 4200 - DNA, 508 bp, Rattus norvegicus
  Genbank Accession No. X14671
tccttttgcggccatcgctggattgcagccgccaaaatgaagttcaatcccttcgtgacttctgaccgaagcaagaaccgcaaacggcatttcaatgcaccatctcacattcggaggaagatcatgtcttctccgctttccaaagaactgagacagaagtataatgttcggtctatgcccattcgaaaggacgacgaagttcaggttgttcgaggacactacaaaggccagcagattggcaaagtggtccaagtgtacaggaagaaatacgtcatctacattgagcgagtccagcgagagaaggctaacggcacaactgtccatgtgggcatccgccccagcaaggtggttatcaccaggctaaagctggacaaggaccgcaagaagatcctggagaggaaagccaagtcccggcaagtaggaaaggagaagggcaaatacaaggaagaaactatcgagaagatgcaggagtagaaaaataatgcccagttttcattaaataaagctt

SEQ ID NO: 4201 - DNA, 16300 bp, Rattus norvegicus
  Genbank Accession No. X14848
gttaatgtagcttataataaagcaaagcactgaaaatgcttagatggattcaaaaatcccataaacacaaaggtttggtcctggccttataattaattggaggtaagattacacatgcaaacatccataaaccggtgtaaaatcccttaaagatttgcctaaaacttaaggagagggcatcaagcacataatatagctcaagacgccttgcctagccacacccccacgggactcagcagtgataaatattaagcaatgaacgaaagtttgactaagctagtacctctcagggttggtaaatttcgtgccagccaccgcggtcatacgattaacccaaactaattattttcggcgtaaaacgtgccaactataaatctcataatagaattaaaatccaacttatatgtgaaaattcattgttaggacctaagcccaataacgaaagtaattctaatcatttatataatgcacgatagctaagacccaaactgggattagataccccactatgcttagccctaaaccttaataattaaacctacaaaattatttgccagagaactactagctacagcttaaaactcaaaggacttggcggtactttatatccatctagaggagcctgttctataatcgataaaccccgttctaccttaccccttctcgctaattcagcctatataccgccatcttcagcaaaccctaaaaaggcactaaagtaagcacaagaacaaacataaaaacgttaggtcaaggtgtagccaatgaagcggaaagaaatgggctacattttcttttcccagagaacattacgaaacctttatgaaactaaaggacaaaggaggatttagtagtaaattaagaatagagagcttaattgaatagagcaatgaagtacgcacacaccgcccgtcaccctcctcaaattagattgacattcacatatacataatttcactaacaaatttatgagaggagataagtcgtaacaaggtaagcatactggaaagtgtgcttggaataatcacagtgtagcttaatcacaaagcatctggcctacacccagaagaattcataaaaaatgaacactttgaactaaccctagccctacaaccaaccaacataactaaacccccacataaactaaaacatttaactcaaaaagtattggagaaagaaatttacttaccaagagctatagagaaagtaccgcaagggaaatgatgaaagactaatttaaagtaaaaacaagacaaagattaaacctgtaccttttgcataatgaattaactagaaaatccttaacaaaaagaatttaagctaagaaccccgaaaccaaacgagctacctaaaaacaatttcatgaatcaacccgtctatgtagcaaaatagtgggaagatttttaggtagaggtgaaaagcctatcgagcttggtgatagctggttgcccaaaaaagaatttcagttcaaactttaagcttccatcagaacaacaaatcaaaatgtaaacttaaaatatagccaaaagagggacagctctttaggaaacggaaaaaaccttaaatagtgaataaacaactacaatcacttaaccattgtaggcttaaaagcaagccatcaataaagaaagcgtcaagccacatcatcttacacacacactaattccacaaacctcaaaaattccaaaattacaaattgggctaaatctatgatcctagtgaatactgttaatatgtgaacaagaaccaatccaccaagcacaagtgctaagacaaccggataaccattgttaattattgaatcataggcataacccaacaatagaattacctatccctaactcgttagcccaacacaggcgtgctttaaggaaagtttaaaaaagtaaaggaactcggcaaacacgaaccccgcctgtttaccaaaaacatctcctctagcataacaagtattagtggcatcgcctgcccagtgactaaagttccacggccgcggtatcccgaccgtgcaaaggtaggataatcacttgttccttaattagggactagaatgaatggctaaacgagggtccaaccgtctcttacttgcaatcagtgaaattgaccttccagtgaaggggcggactcataataaaagacgagaagaccctatggagctttaatttactaatttcaatttatataaaaaaacctaatgggcgaaaacaacaaaattatgaactaccaaatttcggttggggtgacctcggagaataaaaaatcctccgaatgattataaccgagtcggtaaccgtgtccgacccagtcaagtaatactaatatcttattgacccaattattgatcaacggaccaagttaccctagggtaacagcgcgacctatttaagagttcatatcgacaattagggtttacgacctcgatgttggatcaggacatcccaatggtgcagaagctattaatggttcgtttgttcaacgattaaagtcctacgtgatctaagtccggcaatccaggtcggtttctatctatttacaatttctcccagttacgaaaggacaagagaaatggagaccaaccaatcctaggcttccaaccaatttagaaaaacttaataaagtatatatgtacaataaataaccttagacccaagttattagggtggcagagccaagtaattgcgtaagacttaaaaccttgttcccagaggttcaaatcctctccctaatagtgtactttattaatatcctaacactcctaatcccaatcttaattgccataggccttctcaccctagtagaacggaaaatcctaggctacatacaattacgcaaaggccccaacaacgaaggcccatatggtaaactacaaccatttgcagatgccataaaactattcataaaagaacccatacgccctctaaccacctcaatatcactatttattatcgccccaaccctctcccttacactagctctaagcctatgaattcccttaccaataccccacccccttatcaacctcaacctaggcataccatttattctagccacatccagcctttcggtctactccattctatgatcgggatgagcctcaaattcaaaatactccctattcggagccctacgagccgttgcccaaaccatctcttacgaagtcacaatagccttatacctcttatccgtcctcctaataagcggctccttctccctacaaatacttatcactacacaagaacatatctgactattaatccccgcctgaccaatagccataatatgatacatttcaaccctcgcagaaacaaatcgagctcccttcgacttaacagaaggagaatcagaattagtctcaggctttaacgtcgaatacgccgcaggaccattcgccctattcttcatagccgagtacaccaacattattctaataaacgccctaacatcaattgtattcctaggccccttatatcatatcaattaccctgaattatactcaaccagcttcataacagaaacactacttctatccacaactttcctatggattcgagcatcctacccccgttttcgatatgaccaactaatgcacctcctatgaaaaaatttcctcccactaacactagcattctgcatatgatacatttccctgccaattttcctagcaggaattccaccctacacatagaaatatgtctgacaaaagagttactttgatagagtaaataatagaggtttaaatcctcttatttctaggacaataggaattgaacctacacctaagaattcaaaattctccgtgccaccaatacaccctatcctacatagtaaggtcagctaactaagctatcgggcccataccccgaaaatgttggttaaacccttcccgtactaataaatccaattaccctaaccattatttacttaaccacctttaaaggccgcctaatcacgacacttagcaccaacttaccaccaatatgagtaggattggaaataagccttttagctatcatcccacttctagccaacaaaaaaagcccacgatcaactgaagcagcaacaaaatattttctaacccaagctacagcctcaataattatcctactagtcatcatcctcaactacaaacaatcaggaatatgaacccttcaacaacaaaccaataacatactactcaacataatactcatttcactggccataaaacttggactagccccattccactactgactacccgaagtcacccaaggaattcccctacacattggattaatcttactaacatgacaaaaaattgctccactatcaattctataccaattttatcaactcctaaacccaactatcaccaccattctcgcaatttcatcagtctttgttggcgcctgaggaggacttaaccagacccaaacacgaaaaatcatagcatactcatcaattgcccacataggatgaataacagcaatccttccatacaaccctaacttaaccctcctaaacttaacaatttacatcctacttactgttccaatattcaattacatcataacaaactcagcaacaacaatcaacacactctcactcgcatgaaataaaactcccataatcctaaccatagcatccatcatcctcctatcactaggaggactcccccctctcacaggatttttaccaaaatgagcaattatctccgagcttctaaaaaacaactgctcaaccctatcaacactaatagctatcatagccctattaagcctattcttctatactcgactaatttactctatatccctcaccacattcccaaccaacaacaactccaaaataatctcccaccaccaaaacccaaaacataattttatcctcccaaccctcacagtattaagtaccctaaccctaccgctttcctcccaactaatcacatagaagtttaggatatacagttcaagagccttcaaagcccttagaaaacaaacaagtttaacttctgataaggactgtaagactatatcttacatctgttaaatgcaaatcaactgctttaattaagctaaatcctcaactagattggaaggaatcaaattcctacgaaaatttagttaacagctaaataccctacttactggcttcaatctacttctcccgcctatcagaaaagaggcgggagaagccttagtagaggagattctctacaccttcgaacttgcaattcgacatgataatcaccttaaggctttttggtaaaaagggggctcaacccctgtctttagatttacagtctaatgcttactcagccattttacctatgttcgtaaaccgttgactcttttcaactaaccacaaagatatcggaaccctctacctattatttggagcctgagcaggaatagtagggacagctttgagtattctaattcgagctgaactaggacagccaggcgcactcctaggagatgaccaaatctataatgtcatcgtcacagcccatgcattcgtaataattttctttatagtaatacctataataattggaggcttcggaaactgacttgtaccactaataattggagcccctgatatagcattcccacgaataaataacataagcttttgactgcttcctccatcatttctactccttttagcatcctccatagtagaagctggagctggaacaggatgaacagtatatccccccttagccggaaacctagcccatgctggggtatccgtagatttaactattttttccctccacctagccggggtgtcttctatcttaggagctatcaactttatcaccactatcattaatataaaaccccctgctataacccaatatcagacacctctctttgtatgatccgtactaattacagccgtcctactacttctctcactgccagtattagcagcaggtatcactatactccttacagaccgaaatctaaatactactttcttcgaccccgctggaggtggagacccaattctttatcaacacctattctgattcttcggccacccagaagtgtacatcttaattcttccagggtttggaattatttcacatgtagttacctattactctggaaaaaaagaacccttcggatatataggtatggtatgaaccataatatctattggcttcctaggatttattgtatgagcacatcacatattcacagtaggcctagatgtagacacccgagcctactttacatctgccactataattatcgcaattcctacaggcgtaaaagtattcagctgactcgctacactacatggaggaaatatcaaatgatcccccgccatattatgagccttagggtttatcttcttattcacagtagggggcctaacagggatcgtactatctaactcatcccttgacattgtacttcatgatacatactacgtagtagctcacttccactatgtcttatctataggagcagtattcgccatcatagctggcttcgtccactgattcccactattctcaggctataccctaaatgacacatgagcaaaagcccactttgccattatatttgtaggtgtaaacataacattttttcctcaacacttcctaggattagcagggatacctcgtcgttactctgattatccagatgcttataccacatgaaatacagtctcctctataggctcattcatctcacttacggccgtccttgtaatgatcttcatgatttgagaagccttcgcatcaaaacgagaagtgctctcaatttcctactcttcaactaacctagaatgactgcatggatgccccccaccttaccacacattcgaagaaccttcctatgtaaaagttaaataagaaaggaaggaatcgaccccctacaactggtttcaagccaatttcataaccattatgtctttctcaatgagatattagtaaaataattacataaccttgtcaaggttaagttatagacctaatcctatatatcttacatggcttacccatttcaacttggcttacaagacgctacatcacctatcatagaagaacttacaaactttcatgaccacaccctaataattgtattcctcatcagctccctagtactttatattatttcactaatactaacaacaaaactaacacacacaagcacaatagacgcccaagaagtagaaacaatttgaacaattctcccagctgtcattcttattctaattgcccttccctccctacgaattctatacataatagacgagattaataacccagttctaacagtaaaaactataggacaccaatgatactgaagctatgaatatactgactatgaagacctatgctttgactcctacataatcccaaccaatgacctaaaaccaggtgaacttcgtctattagaagttgataatcgggtagtcttaccaatagaacttccaattcgtatactaatctcatccgaagacgtcctgcactcatgagccatcccttcactagggttaaaaaccgacgcaatccccggccgcctaaaccaagctacagtcacatcaaaccgaccaggtctattctatggccaatgctctgaaatttgcggctcaaatcacagcttcatacccattgtactagaaatagtgcctctaaaatatttcgaaaactgatcagcttctataatttaaactcattgcgaagcttagagcgttaaccttttaagttaaagttagagacaacaaatctccacaatgacatgccacaactagacacatccacatgatttattacaatcatctcctcaatagccacactatttattttatttcaattaaaaatttcttcccaaacctttcctgcacctccctcacccaaaactatagccacagaaaaaacgaataacccttgagaatcaaaatgaacgaaaatctatttgcctctttcattacccccacaataataggtctaccaattgttgtgaccattattatgttcccatcaattctattcccatcatcagaacgcctaatcagcaaccgactacactcatttcaacactgactaatcaaacttatcatcaaacaaataatgttaattcacacaccaaaaggacgaacctgagccctaataattgtatccctaattatatttattggctcaaccaaccttctagggcttcttccccatacatttacccctaccactcagctatctatagacctaagcatagccatccccctatgagcaggagccgtaattctaggtttccgacacaaactaaaaaattctttagcccacttctcaccgcaaggaacccccatctcactaattcccatactaatcatcatcgaaactatcagcctatttattcaaccgatagcactagcagtacgactaacagcaaacattacagcaggccatctattaatgcatctaatcggaggagctaccctagtacttatagacatcagcccaccaaccgctacaattacatttattattctacttctacttacagtacttgaatttgccgtagccttaattcaagcctatgtattcacccttctagtcagcctgtacctacatgataacacataatgacccaccaaacccatgcataccatatagtaaacccaagcccatgaccactaacaggagccctatcagctcttctactcacatccggcttagtaatatgattccattacaactccacaattctcctatcattaggcctcctgacaaacatcctaactatatatcaatgatgacgagatatcatccgtgaaggaacataccaaggccaccacacccctattgtacaaaaaggcctccgatacggaataatcctgtttattgtctccgaagtattcttctttgccggatttttctgagcattttatcattccagcctagttcctacccacgacctaggcggttgctgacccccaacaggaatcacccctttaaatcccctagaagtaccccttctaaatacatcagtcctcttagcatcaggagtctcaattacatgagcccatcacagcctaatagaaggcaaccgaaaccatataaaccaagccctactaatcaccattctcttaggattatatttcactatcttacaagcctcagagtatttcgaaacatcattttctatctcagacggaatttacggctcaacattcttcatagcaacgggatttcatggcctccacgtaattattggctcaactttcctaattgtctgtctactacgacaactaaaattccacttcacatcaaaacatcatttcggatttgaagccgcagcatgatactgacacttcgtagatgtagtttgactattcctatacgtttctatctattgatgaggatcctactcccttagtataaacaatacaactgacttccaatcagttaattctgaaaaaactcagaagagagtaattaacctacccattatcatcacaattaacatcaccttatcctttatcctcatttcaattgcattctgattgcctcaaataaacttatactccgaaaaagcaaacccatatgaatgtggcttcgacccaacaagttctgcacgccttcctttttcaataaaatttttcttagtagccattacatttctactattcgacctagaaatcgccttactacttcccctcccatgagcgattcaaacaaccaataccactacaataatagcaactgcctttattttagtcactattttgtctcttggcctagcctacgaatgaacacaaaaaggactagaatgaacagaataattggtaattagtttaaataaaattaatgatttcgactcattagattatgataataatcataattaccaacaatgacatctgctttcctaaatttaactatagcctttacattatctctactaggtacttttatatttcgctcccacctaatatccactctcctctgcctagaaggaataatactatcactatttgtcataacttcaacatccacattaaactccaactccataatctccataaccatcccaattaccattctagtttttgcagcctgcgaagcagcagtaggtttagccttactagtaaaaatttcaaatacttacggaacagactacgtacaaaacctcaaccttctacaatgttaaaaattattttcccatctatcatactcctcccactaacatgactctcagccaacaaaaaaatctgaaccaatgtcacctcctacagctttctagtgagcctattaagcttatcactcctatgacaaaatgacgaaaattacctaaatttctcagttatattctcctccgatccattatccaccccactaatcattctaacaacttgactcctcccactaataatgctcgctagccaaaatcacataaaaaaagaaaatataatgcatcaaaaactttacatctcaatacttattagcctccaaattttactcatcataacattctccgcaacagaactaattttattttatatcctgttcgaggccactctaatcccaacactaattatcattacacgatgaggcaaccaaacagaacgcttaaatgcaggaatttatttcctgttttatacactaattggctccatcccactcttaattgccctcatttcaatccaaaactcaataggaacactcaacttcctaatcctttccctcacaacacaccccctaccctcaacatgatccaacaccattctatgactagcatgtataatagcatttataatcaaaataccattatacggagtccatctatgattaccaaaagcccacgtagaagctccaattgcaggctctataattttagcagcaattctcctaaagctagggggttatgggataatacgagtttccatcattctagaccccctaacaaaatctttagcctacccattcatcatcctctcattatgaggcataattataactagctcaatctgcctacgccaaacagatctaaaatcattaattgcttactcatcagtaagccatatagccctagtcatcacagccattataatccagacaccatgaagcttcatgggagccacaatactaataatcgcccacggcttaacctcatcactcttattctgcctagcaaacaccaactacgaacgaattcacagccgaactataattatagctcgaggattacaaataatctttccattgatagcaacatgatgactattagcaagcttagccaacctagcactaccacccctaattaacctcataggcgagttattcattgttatagcaacattttcctgatcgaacccctctatcatccttatagcaactaacattgtcatcacaggaatatactcaatatatatgattatcacaacccaacgaggaaaactaaccagccacataaacaacctccaaccttcccacacacgagaattaacactcatagctctacacattattcccctcatactattaacaatcaaccctaaactcatcacaggcctaacaatatgtagatatagtttacaaaaaacattagactgtgaatctaacaacaggaaatcaaattccttatttaccaagaaagtatgcaagaactgctaattcatgcacccatacctaaaacatatggctttcttacttttataggatagaagtaatccattggtcttaggaaccaaaaaccttggtgcaactccaaataaaagtaataaatataataacaatcctaatcctcataattcttgatttacttacaacaccaatcacattttcaataacaatcttaaccaaacttatgtacttccgtcatatgctcattacatcaattaaattctcattcctccttagcctcttacctttactactattcttccaccacaacacagaatacataattactaactgacattgactaactattaattctattaaacttactataagtttcaaaattgactatttctcaatcctattcctatcagtatccctattcgtaacatgatcaattatacaattctcttcatgatatatacactctgacccccacattaaccgattcattaagtacttaataatattcctgaataacatactaatcctaacctcagctaacaatctattccaactctttattggatgagaaggggtaggaattatatccttcttattaatcggatgatgatatggccttgcagacgccaacacagcggccctccaagcaatcctctacaaccgagtcggagacattggtttcatcctagctataacctgattctgcctaaacataaactcctgagaactccaacaaattttcttaaccaacaccaacaacaatctagtccctctcacaggactactaattgcagccacaggaaaatccgcccaattcggacttcatccatgactcccatcagctatagaaggcccaactcccgtctctgccctactacactcaagcacaatagttgtagcagggatcttcctaataatccgattccaccccctaacctcaaacaatagtactattataacagccatactatgtcttggtgcaatcaccacattattcacagcaatctgtgctctcacccaaaacgacatcaaaaaaatcgtagctttctcaacatccagccaactaggccttataatagtcacattagggattaaccaaccctaccttgctttcctccacatttgcacccatgcattcttcaaagccatattattcatatgctccggatcaatcatccatatcctcaacgatgaacaagacattcgaaaaataggcaatataataaaagcaataccattcacatcatcttgtctcattatcggaagcctagcccttaccggaatacctttcctcacaggattctattcaaaagatctcatcatcgaagccatcaacacgtgtaacaccaacgcctgagccctaataatcactttaatcgccacatccataactgctgtgtacagcatacggatcatctacttcgtcaccatgacaaaaccacgatactccccactaattactattaatgaaaacaacccaaacctcattaatccaatcaaacgcctagcattaggaagcatcctagcaggcttccttatctcactaaatattcctccaactaacattcaaattctcacaataccctgacatttaaaaataacagccctacttattacaatcctaggatttgccattgccctagaacttaacaatttaacactaaatctatcaataagcaaacccaccaaactatcatcattctcaacctccctaggctactacccaccaattataccccgaattattcctcaaaaaactctaaattctagctacaaattatccttaaacctactagacctaatctgatcagaaaagacaatcccaaaatcaacctcaatcacccaaacccaactatctaaaataatatccaaccaaaaaggactaatcaaactatatttcctatcatttctcatcactatttcactaatttttatcttacacacacttaatcccgagtgatttcaataataataaaaatccccgcaaacaatgaccacccagccaccactatcattcaagtagcacaactataaatagccgcaaccccaatccccccctccaacataaccccaacatcatcaatctcatacattaatcaatcgcctagactatcaaaatcaactaactccaccttattattcaaactaaacaagtagaacactaccaactccataaaaagccctaaaacaaaaaaactaaaaataaaccaattagaccctcaagtttccggatattcctcagtagccatagcagttgtatacccaaatacaaccaacatcccacccaaataaattaaaaatactattaaacctaaaaacgaacccccaaaccctaaaactattaagcacccaatacatccactaacaatcaatccaaacccaccataaataggtgaaggcttcaacgccaaccctagacaaccagtcaaaaacagtaaacttaaaataaacatataatttgtcattatttctacacagcatttaactgtgactaatgacatgaaaaatcatcgttgtaattcaactatagaaacatctaatgacaaacatccgaaaatctcaccccctattcaaaatcatcaaccactcctttatcgacctaccggccccatctaacatctcatcatgatgaaacttcggttctctactaggagtatgcctcatagtacaaatcctcacaggcttattcctagcaatacactacacgtctgataccataacagcattctcatcagtcacccacatctgccgagacgtaaactacggctgactaatccgatacctacaagccaacggcgcctcaatatttttcatctgcctattcctccatgtgggacgaggactatactatggatcctacactttcctagaaacctgaaacattgggatcatcctactatttgcagtcatagcaactgcattcatgggctatgtactcccatgaggacaaatatcattctgaggagctacagtaattacaaacctattatcagctatcccttacattgggactaccctagtcgaatgaatctgaggaggcttctcagtagacaaagcaaccctaacacgcttcttcgcattccacttcatcctcccattcattatcgccgcccttgcaattgtacatcttcttttcctccacgaaacaggatcaaataaccccacaggattaaactccgacgcagacaaaatcccattccatccatattatacaattaaagacctcctaggtgtatttatattactattattcctaataaccctagtactattcttcccagacctactaggagacccagacaattatacacccgctaaccccctcaacaccccaccccacatcaaaccagaatgatactttctctttgcctacgctattctacgctccattcccaacaaactaggaggggtcgtagccctaatcttatcaatcctaatcttagccttcctaccattcctgcatacctcaaaacaacgcagcttaacattccgcccaatcacccaaatcctttactgaatcctagtagccaacctcctagtcttaacatgaatcggaggccaaccagtagaacacccatttatcattattggtcaactagcctccatcagttatttttcaattatcctcattctcataccaatctctggaattgttgaagacaaaatgttaaaatgaaattaatgtcccgatagtataaaaattactctggtcttgtaaaccaaaaatgaagagtcagtcttctcaggacaatcaagaagaaggaactacctccccaccatcaacacccaaagctgatattctacttaaactacttcttgtcagtacataaaatgatatggacattaaaacatttatgtatatcgtacattaaattattttccccaagcatataagcatgtaatatatatctaatgatttaggacatacatttaaactcaactataaattcacaacaacatgtctattctcaaatacattaagataatgcttattagacatatctgtgttattagacatgcaccattaagtcataaacctttctcttccatatgactatccctgtccccaattggtctctatttctaccatcctccgtgaaatcaacaacccgcccactcgtccccctcttctcgctccgggcccattcgtcctgggggtgactatactgaaactttaccaggcatctggttcttacttcagggccatcaattggttcatcgtccatacgttccccttaaataagacatctcgatggtaacgggtctaatcagcccatgatcaacataactgtggtgatatacatttggtattttttaattttcggatgccttcctcaacatagccgtcaaggcatgaaggtcagcacaaagtcctgtggaaccttttagttaagggtcatttatcctcatagacaaagctcgaaagactattttattcatgtttgtaagacataaatatttataaatactgaaaaatctgtcaacaaacccccccaccccctacacctgaaacttcaatgccaaaccccaaaaacattaaagcaagaattaaataaaacaaaaagctacttaattcttaaaaggcttctccattctagtagaccacaaaattttaacttaaatcttagcattggtaaaatttcccgacacaaaatctttcctcctaactaaaccctctttacttgcctaccctcagaaaattccacatacaccaaa

SEQ ID NO: 4202 - DNA, 851 bp, Rattus norvegicus
  Genbank Accession No. X15013
cgagcggatgcccaaaggaaagaaggccaaggggaagaaggtggccccggcccccgccgtggtcaagaaacaagaggccaaaaaggtggtcaatcctttgtttgagaaaaggcctaagaacttcggcattgggcaggacatccagcccaaaagagatctcacgcgcttcgtcaaatggccccgctacatcaggctgcagcggcaaagagccatcctctataagcggctcaaagtacctcctgccatcaaccagttcacccaggccctggacaggcaaacagcgactcagctgcttaagcttgcccacaagtacaggccagagacaaagcaggagaagaagcagaggctgctggcccgcgctgagaagaaagctgctggcaaaggggacgtcccaactaagagaccacctgtcctccgagcaggggtcaatacagtcaccactttggtggagaacaagaaggctcagctggtggtgattgcccatgatgtagaccccattgagctggtggttttcctgcctgccctgtgtcgaaagatgggggtgccctactgcatcatcaagggaaaggccaggctggggcgcctggtccacaggaagacatgcaccactgttgccttcacacaggtgaactcggaagacaagggtgctctggctaagctggtggaagctattaggaccaattataatgacagatatgacgagatccgccgccactggggaggcaacgtcctgggtcctaagtctgtggctcgcattgccaagctggaaaaggcaaaggctaaagaactcgccactaagctgggttaaatgtacacttaagttttctgtacataaatataattacaaagtt

SEQ ID NO: 4203 - DNA, 977 bp, Rattus norvegicus
  Genbank Accession No. X15551
atctacaatgatttctccggcgctcatcttcttttctgccttcctctgccatgttgctattgcgggacggaggatgtggcccatcaacaccctgaaatgtacacccagagtgtgtccttttgccggaatcttagaaaatggagttgtacgctacacgacttttgaatatcccaacaccattggctttgcttgtaaccctgggtattatctgaacgggactagctcttctaagtgcacggaggaaggaaaatggagtccagaacttcctgtttgtgctcggatcacctgcccgccaccaccaattcctaagtttgcagcccttaaggaatacaagacttcagttgggaacagctctttttatcaggacacagtggtctttaaatgcttgccacactttgccatgtttggaaatgacacagttacgtgcacagcccatggaaactggacccaattgccagaatgccgggaagtaaaatgtcccttcccttcaaggccagacaatgggtttgtgaattaccctgcaaagccggtgctttcttataaagataaagccgtatttggttgccatgaaacatacaaactggatggcccggaagaagtggagtgtaccaagacaggaaattggtcggccctgccgagctgtaaagcatcttgcaaactctctgttaagaaggccaccgtgttgtaccaagggcagagggtgaagatccaggaccagtttaagaatgggatgatgcatggtgacaaggttcacttctattgtaaaaataaggagaagaagtgcagctacaccgaggaggctcagtgcatagacggcaccatcgagatccccaaatgcttcaaggagcacagttctctggcgttctggaaaacggatgcatcagatgtgacaccgtgctgaagacattttcagaatcaaaattgaatgtctcatttgtatctctgcttgtctgaggaatcaactgaaatagcagaat

SEQ ID NO: 4204 - DNA, 2681 bp, Rattus norvegicus
  Genbank Accession No. X15580
agctaggaagataggaagtgaggtccaataccttgtgggcagtggtgtcattagctgcaacgcctaagatgtctcgagagatgggagaactcactcaaaccaggttacagaagatctggattccacacagcagcagtagcagcgtgctgcaacggcgaaggggctcctccataccacagttcactaattctcccacgatggtgatcatggtgggtttaccagctcgaggcaagacctacatctctacgaagctcacacgctatctcaactggataggaacaccaactaaagtgtttaatttaggtcagtatcgacgagaggcagtgagttacaggaactatgaattctttcgcccagacaacacagaggcccagcttatcaggaagtaagtaacagtatttaagactctgtactgccccttggctgagtggggcctgtctttatatcataagagagtggtatagagaaacccacttttccagggtgtccatacttttgacattacaacccagcatagccatctacagtattggttcttgagaattcctcagtcaagttatgaatagggaaaaatgcagaaattctcaaaaattttaaaggaagtttacagtctgtgttgggtcacatttcatagttagcctaggccatgagttgaacgcctttgtgcccagtctttctgtcagcctactcaacatctgctctagtcatagccattttctctcaagaaggttttccaggcctgtatttctggtaagcaagcataggaatatcttctcctcgcacttgagatgagtgtttcccaagcttcagtctctgtctcatcacttcagctttaaagtctcttttacctatgtgtttggaagtacttgtagatgcaacctggctctgaacctcttatctgggtcttcactacagaacccaataaccaataagaaatattttgctgaaacctaagtacattatcactgttatacctgtgcttaaaatattgcctatgccaagaattcgttttaactcaaagagcacatccatccctatgccttacccatgtacattaaccaattcagctttagctccagtagcacacagttagatccctaaaactatggtgatttcattgttcagtttttcttgggcatgtctcctcatcttcagcttctaagcatacacacagagccagtttcaactctgacccctttattagaacagagggcaccgttctagatgttcgatggataggtgaactatgtagatgttcaacagagagatgctttgtaagagaactgcagtgagaggaactgatcctgaggatagggattctctgcttctttctctgtttttcaggcagtgtgctctagcagccctaaaggatgtccataagtatctcagccgcgaggaaggtcatgttgcggtttttgatgccaccaacactaccagagaacgacgatcgttgattctacagtttgctaaggaacatggttataaggtcttctttattgagtctatttgtaatgaccccgaaatcattgcagaaaacatcaagcaagtgaaacttggtagtcctgattacatagactgtgaccaagaaaaggttttggaagactttctaaagagaatagagtgctatgagatcaactaccaacctttggatgaggaattggacagccacctgtcctacatcaagatcttcgacgtgggcacacgctacatggtaaatcgagtgcaggaccacgttcagagccgtacagcctactacctcatgaacatccatgtcacacctcgatctatctacctatgccgccatggtgagagtgaactcaaccttagaggccgcattggaggtgactctggcctctcagctcggggcaagcagtatgcctatgcactagccaacttcatccggtctcaaggcatcagctccctgaaagtatggactagccacatgaagaggaccattcagaccgctgaagccctaggtgtcccctatgaacagtggaaggccctgaatgagattgatgcgggtgtctgtgaagagatgacctatgaagaaattcaggaacactaccctgaggaatttgcactacgggaccaggataaatatcgttaccgctatcccaagggagagtcctatgaggatctggttcagcgtcttgaaccagttataatggagctagaacggcaagaaaatgtactggtgatctgtcaccaggctgtcatgcggtgcctcctggcatacttcctggataaaagttcagatgagctgccctatctcaagtgtcctctgcatactgtgctcaaactcacacctgtggcttatggctgcagagtggagtccatctacctgaatgtggaggctgtgaacacacaccgggacaagcctgagaatgtggacatcacccgtgaagctgaggaagccttggacactgtacctgcccattactgagcccttttcaagtgatcagattgtctctgttctcacccccttcctcctgtaggagctgctgcccttgttctccttaagcagactctggctatggcctgagagtgccctacctccagtgaagaagtccgtagcagctcccaaacaggtctcaattcctagccacaactaaggcacctacctagttgtggataaagttccttttaaatattctctgataaataaagatgtttatttctgc

SEQ ID NO: 4205 - DNA, 1840 bp, Rattus norvegicus
  Genbank Accession No. X15734
cgagaaactacaggcaaactttcagctttgaagttgtcaccttggagaagtgaagtcgagaagtgtgacaccatgaatggacctgtggatggcttgtgtgaccattctctaagtgaagagggagccttcatgttcacatctgaatcggtaggagaagggcatccagataagatctgtgaccagattagtgatgcagtgctggatgcccatctcaagcaagaccccaatgccaaggtggcctgtgagacagtgtgcaagacagggatggtgctcctgtgtggagagatcacctcaatggccatgattgactaccagcgggtggtgagagacaccattaagcacattggctacgatgactctgccaagggcttcgacttcaagacctgcaatgtgctcgtggctctggagcaacagtccccagacattgcccaatgtgtccatctagacagaaatgaggaggacgttggtgcaggagatcagggtctgatgttcggctatgccactgacgagacagaggagtgcatgccgctcaccattgttcttgctcacaaactcaacacccggatggcagatctgaggcgctctggtgtccttccctggctgagacctgattctaagactcaggtaacagttcagtacgtgcaggataatggtgctgtcatccctgttcgcgtccacaccatcgtcatctctgtgcaacacaacgaagacataacactggaggccatgcgagaggccctgaaggagcaggtgatcaaagctgtggtgccagccaagtacctggatgaagacaccatctaccacctgcagccaagtgggcggtttgtcatcggaggtccccagggggatgcaggtgtcacaggccgcaagattattgtggacacatacggaggctggggtgcccatggtggtggtgccttctctggaaaggactacaccaaggtggaccgctcagcagcttatgccgcccgctgggtggccaagtctctggtgaaggctgggctctgccggagagtccttgttcaggtgtcctatgccattggtgtggcagaacctctgtccatttccattttcacctacggaacttccaagaagaccgagcgagacgagctactagaggttgtgaacaagaactttgacctccggccgggtgttattgtcagggacttggatctgaagaagcccatctaccagaagactgcatgctatggtcatttcggaagaagcgagtttccctgggaggtccccaagaagcttgtgttttagagctgccgggaagcttagctctgtcctatactcaacctcctcaagatctcaactccctggtctcagagagccctccctgcttcccaccctatgcaaagccagcttcctccgattttccccctacccggcaatctgcaaacatcttaatagtggcaaggcaggtggtttctggtgctaggtcatcaggtctccttgcaaggatagtcagtgttccctccctgtctctcagatgacaacaatgttaattttgtgtaaaagttgctcctgtcatcccctcccgtagtctgaagctaaccaggccatctcttcctccgtcctggacatgtgcccagatgaatgttttgtcccatatctctggcttcccctttacattggcagccagaggtcctgagccggggcttcctcagggtccctctgagactgggcatctgctccctaggatatggtcagtgtcccctgaacatctgcattctgtgagggactgagctgtgtgttcttcatcccaacacaataaggtggtatcgtcattatccacagtgacagatggggaaactgaggctcagagagcgagctc

SEQ ID NO: 4206 - DNA, 544 bp, Rattus norvegicus
  Genbank Accession No. X17665
ctttccggtggcggcgcggcgcggtgaggagctcgtgttcatacttgtagctatgccgtccaagggtccgctgcagtccgttcaagtcttcggacgcaagaaaacagccacagctgtggcccactgcaaacgaggaaatgggctcatcaaggtgaatggacgtcccctggagatgatcgagccgcgcacgctgcagtacaagttactggagcctgttctgcttctgggcaaggagagatttgctggtgtggatatccgggtccgtgtgaagggtggtggtcatgtggcccaaatttatgctatccggcagtctatctcaaaagctctggtggcttattaccaaaaatatgtggatgaagcctctaagaaggagatcaaagatatcctcatccagtacgatcggaccctgcttgtagctgacccccgtcgctgcgaatccaagaagtttggcggtcccggtgcccgtgcccggtaccagaaatcctaccgataagccagtctcaaggatcagggtttacctttgtaataaacatcctgggacttt

SEQ ID NO: 4207 - DNA, 3330 bp, Rattus norvegicus
  Genbank Accession No. X51529
tgtgatggaatgaatgactgacacgtgaattaagcagcgtacagaaccagcgttccctttcctatcccccaaagtyacagtttatcagaagaaagaaacatcccagactttcaaacactcattccctcccctgtatacagtccttccatgctcctggaagtggctgccaggaggctgcaggcggtcacacccagatgggcttttggaaagttctccagtcaggagctgcaccctgtttctcatcaaccgaatgaactttcgaaatcagctaaagtttatgatggccacaacccatggtatgagggcttttccggccctcaaggctgttctgccagctgttggggggaaaaggggaaattacccagggcgttgggtatgcccgtctgtgaatccattatttggccacacccacctccccatccctgtggctctccgatccccagccctgcagagggaagagctatttaagagcattgggagtacaggaaaaacaaggcaggcccttgaacaagaagccataccaccatcccatccaagaggtacatgcccagaaactcctgccctttggatgcatttgagtgattgtgcatgtgagcatgtgtgtgtgtatggacgtgcctgtggatgtgaattcccatcaggtaaacatgtacaagaccgcattcctgggcaagtatcttatatgggattgtgagagtgctgggggagaatttgagaatgtgtgtgtttacatgtcatccgtcgtgggttagaaaggaggcatcatatgtataaatatgtaatcgtcacaggcttacaagggcagcatgtgtgcatgtcatttgcatagtgttagaatagaaaggcatcatgtatgtatacacgtagtgggcagagtcagaaaggcttgcaaagagaatgtgcagttttagttggagaggagactgtcaggatcggaccctgtggatggaattcctaagccttgaatctaacttgaggatgtaggtgaagtatatagtggaggcagacattgccttcaacccctccaccccaattctgcagaacgagtcccaggaggactagaggaagtgcaggggtggtcccatcaccacatcattcctgtgtgagggacagttccacggagccaggagggacaagaggtgacattcgaaatgcacggtcggaagccactctgtgtgtactctgtgacttagccccatgcaagtgcacatctgtgctctgggattgctaagtcagacagctgagcaggggctgggtaaagggtaagctgtcctggaaggaagtgaccaggctgtgtgtacctgtccttcacagagctgacagcatgaaggtcctcctgttgctagcagttgtgatcatggcctttggtaagagtggaccctgaactcagcacaatgagagaggtaacctgaggagggaggcaccctatcccctggctttccttcctgtgggcctggccctctcttagtgtgaggaggaagaagccatttgtggggagagaaagtagcagagagatgccatgtggagttggggcacagaggttcaccacccttgaccagcttatttccccatttcctttcaggctcaattcaggtccaggggagccttctggagtttgggcaaatgattctgtttaagacaggaaagagagctgatgttagctatggcttctacggttgccattgtggtgtgggtggcagaggatcccccaaggatgccacagattggtaagaccaccccagtccccctatcctctgtcactccagctggacgggactaagagggagctggtactcactacctcagtgtcccaccgaatcccagccagccgatgttagcagattgggagctctgccctggaccactctaaagttcttgagtctctgctcagaaccaaaggtcaaaggaagtgctggggtaccaggactcaagggccgtgagaaggcagcctcagtaaggtctgtcctccaaccaggtgctgtgtgactcatgactgttgttacaaccgtctggagaaacgtggatgtggcacaaagtttctgacctacaagttctcctaccgagggggccaaatctcctgctctagtaagataccctgagatacctgcccgctttcttcacgggggtgttgagcacacacatgcatgctgggaactttactggtgcaggcttacttacacaagcaggcctgttagcaggacagcagggccaaagatgtagctcagctggctgggtgctagcctagcatacgtgagggcctgggttccaccctcagcagtgtatgaaatgcacaaaatttggcatgacctgaatcccagtgctcatgtgcaggcaggaggatcagaagttcaaggccatcttcagctacttagagaactcaaaggcagcctaagctataaagaccctgtcccctcacccctcgtccctcgcccctcgctcctcccccttccccctctccctcccctcccccccaaaaaaaccctagaagagggtggctagggatcgaggcaaacctctggcagcgccatgtgtggccactgtgtgtccccatcagatggtcagatggggttctgccttcccaggaagcagacagttccccacgagcagccatgagacagtagccatcagctctgtgtccgtttccccctaattgcagcaaaccaggactcctgccggaaacagctgtgccagtgcgataaagctgccgctgaatgttttgcccggaacaagaaaagctacagtttaaagtaccagttctacctcaacaagttttgcaaagggaagacgcccagttgctgaaagagccatcttctgaaacatccagacatcctctaacacctctcctagcccaaccaagttccccagtgatcaagaaaacacccctctccaaccctagaagcaggcgggcccttctgtcttcacccagaaggagccgctgaagcctgatctttccccaacactccacagccttggatccgcccactttcacttttcccttggcatccaacttcctgctgcgtagtacctaagagagtcctgagaggctctcgcaagtaaagcaattcatcaacaaccacgtgtgtgttctcataactcgaaacgagacagatataaaatatgcatgctcaaagtataggccttgaggctggggaggtggctcagtccataaagtgcttgccaaaaaaaaaaaaaaacaaaaaaaacaaaaacacgagggcctatgttcaacccccagaacccagggacatcaagggcattcttgtttgcaatcctagagttggggaaagaaagaaagtggacccctggggctcaatggccagccaggctagc

SEQ ID NO: 4208 - DNA, 817 bp, Rattus norvegicus
  Genbank Accession No. X51536
agcggcgccgggcagaagatggcggtgcagatttccaagaagaggaagtttgtagctgatggcatcttcaaagctgaactgaatgagtttctcactcgggagctggctgaagatggctactctggagttgaagtccgagttacgccgaccagaacagaaatcattattttagccaccagaacacagaatgttcttggggagaagggtcgtcggatcagagagctgactgcagttgtccagaagcggtttggcttccctgaaggcagcgtagagctgtatgcagaaaaagtggccacaagaggtctgtgtgccattgcccaggcagagtctctacgctacaaactcttaggagggcttgcagttcgaagggcctgctatggtgtgcttcggttcattatggaaagtggggccaagggctgtgaggttgtggtctctgggaagctccgaggacagagggccaagtccatgaagtttgtggatggtctgatgattcacagcggagaccctgttaactactatgttgacactgctgtgcgccatgtgctcctcagacagggcgtgctgggcatcaaagtgaagatcatgctgccctgggacccaagtggtaagattggtcccaagaagcctctgcctgatcatgtgagcattgtggaacctaaagatgaaatcttgcccaccacccccatctcagaacagaagggtgggaagccagagccacccgccatgcctcagccagtgcctacagcataacagggtcttggcagctgcatctggaggctggatgttgtcttgtaaagacgtttaataaaatcttgaa

SEQ ID NO: 4209 - DNA, 2376 bp, Rattus norvegicus
  Genbank Accession No. X51615
cgcggccgtccgctctcccaactcgcagccagtcggcgcgtcccgcctactgagcgcagcctccaccaggatccgcggggaccagctcgggatcagccggcgacccacttctgaccaacccaggagcggcccgatacccactcccgaccaacccgcgaccgacccagggacccactccggacctgctccttacaggggacagcgcctcgccgcttcccgccgcccagcgcccgcacgctcctcgggacacagtgccaaccatccagaggacaagatggattggggcacactacagagcatcctcgggggtgtcaacaagcactccaccagcattgggaaaatctggctcactgtcctcttcatcttccgcatcatgatcctcgtggtggccgcgaaggaggtgtggggagatgagcaagccgattttgtttgcaacactctccagcctggctgtaagaatgtgtgctacgaccactacttccccatctctcacatccggctctgggctctgcagctgatcatggtgtccacgccggccctcctggtagctatgcacgtggcctaccggagacacgaaaagaaacggaagttcatgaagggagagataaagaacgagtttaaggacatcgaagagatcaaaacccagaaggtccgtatcgaagggtccctgtggtggacctacaccaccagcatcttcttccgggtcatcttcgaagctgtcttcatgtatgtcttttacatcatgtacaatggcttcttcatgcagcgtctggtgaagtgtaacgcctggccttgtcccaatacagtggactgcttcatttccaggcccacagaaaagactgtcttcacggtgttcatgatctctgtgtctggaatttgcatcctgctaaacatcacagagctgtgctatctgttcattaggtattgctcagggaagtccaaaagaccagtctaatgcattgcctggctgttaagcaaagatgagggagaggatgaggcaacctgtgcttagttatcagagttcagctaccagcatctcccgggcaaacattcccaccttaaatgccgccatttgaagtcccccgcaggcctcccatgaaactccagaagcctccatgggcctcccttcccccaaagctcccaaacaaaggcccaattctatgcctgtattaatgggttctaaagttagttagaccccgtgctggtgtgactatgctttaggatacattcacagtttaaacaaagggatctcacattgtttctcttcctctgaggacaggagacatgagcccagtcctgaggaaggtacagagaaagttccttcttccgggtccccttccccaagttgcccccagttaagggtaaagaatcttcgttctgttattttctttcatagtttaagtttgcaacaatggacaaaagctatttaatgttcaagctagctgtgtccttttttttttttttaaatgaaaaccttaaaatgataggttcttttgttcttaaaatgatctggaaagcattatacattcctcctatttcagaggttcggtttgtgatgtgagcatggtgtataaccagatctcacaaggtctttaaaacgttggccttttggttatgggaaacctgggctgtggctgagagcccacctactgtattcatccttaggtgtgctgagtacagcccgcaacaacgttacagcctgtctcaaatgagacaaactggaagcttctcgtgttagcttctgacaagaagaggccttgattaaaattttcaaccgtaattttgtgtaagaggcagataggttatgcctacaactgccccctgccatgagcctaactcagcccccctccacccccagctcgtctactctgtagctgtgggatgtggcagtcagtatcaaaagacttcatgagtttgcttgggaatttcactgccatggtacaatttaatggtgcagaaacaagatggggtggttttcaaagaaccgatgaaacttctagactctaaatcctgttgattaaaactgagtttttctactttgaatgtctgtttgcctcccttttcagcattgccttctaaactggaaacagaaatgttgatatttggaaaaaatagaagaaactagtttaggtcaatgtgtaacttttctaggacaagttgaaccttagcattgtcattctgcctgatgtgttgtccacaagatgacagtcaacaaatccaacaggggacacttcttcctgccaagaatgtcgttgggaagccattctgtaacaataaataagagttgtggtttaaagtctacactattttacctaatgaagaacttattgctgatgttcagaaattcgacattgaaaggtgttttgccaatacggg

SEQ ID NO: 4210 - DNA, 671 bp, Rattus norvegicus
  Genbank Accession No. X51706
ccgagaatgaagaccattctcagcaatcagactgtcgacattccagaaaatgtcgacatcactctgaaggggcgcacagtcattgtgaagggccccagaggaactctgaggagggacttcaatcacatcaatgtagagctgagtcttcttggaaagaaaaagaaaaggctccgtgttgacaagtggtggggtaacaggaaggaactggccactgtcagaaccatctgcagtcatgttcagaacatgatcaagggtgtgacactgggcttccgttacaagatgaggtctgtgtatgctcacttccctatcaacgtcgttattcaggagaatgggtctctggttgaaatccgaaatttcttgggtgaaaaatacatccggagggttcggatgaggacaggtgttgcttgttctgtctctcaagcccagaaggatgagttaatccttgaaggaaatgatattgaacttgtttcaaattcagcggctctgattcagcaagccacaacagttaaaaacaaggatatcaggaagtttttggatggcatctatgtttctgagaagggaaccgtccagcagcctgacgaatgagacctcagtttcctagcttcagaaacaagatcctgataacaagtacagtttgggctctgtggaaacaataaaagacttatatattg

SEQ ID NO: 4211 - DNA, 509 bp, Rattus norvegicus
  Genbank Accession No. X51707
cctttcccctggctggcagcgcggaggccgcacgatgcctggagttactgtaaaagacgttaaccagcaggagttcgtcagagctctggcagccttcctcaaaaagtctgggaagctgaaagtccccgaatgggtggacacagtcaagttggccaaacataaagagcttgccccatatgatgagaactggttctacacacgagctgcttccacagcacggcacctgtacctccgtggtggtgcaggggttggttccatgaccaagatctacggaggacggcagagaaacggtgtcaggcccagccacttcagcagaggctctaagagtgtggcccgccgggtcctccaagccctggaggggctgaaaatggtggaaaaggaccaagatgggggccgcaagctaacacctcagggacagagagatctggacaggatcgccggacaggtggcagctgccaacaagaagcattagaacaaaggatgctgggttaataaattgcctcattcat

SEQ ID NO: 4212 - DNA, 5066 bp, Rattus norvegicus; identical to SEQ ID NO: 3246
  Genbank Accession No. X52477

SEQ ID NO: 4213 - DNA, 2443 bp, Rattus norvegicus
  Genbank Accession No. X52713
gatggttcttagcacagaggaaaacaggagtgttgatttagtcaacttacccagtgtcccactgcccgatggagaggctggcgtaggggagaacaacaaggattccgtgaacaacctctgcagtcagtatgaggagaaggtgcggccctgcattgacctcatcgactccctgcgagctctgggtgtggagcaagacctggccctgcctgccatcgctgtcatcggggaccagagttcagggaagagctctgtgctggaagcactgtctggagtggccctccccagaggcagtggtattgtcaccagatgtcccctggtgctgaaattgaagaagctgaatcagggagaggagtggaaaggcaaagtcacctatgatgacatcgaagtggagctctctgatccttcagaggtggaagaggccatcaacacaggtcagaaccatattgctggggtagggctggggatcagtgataaactcattagcctggatgtcagctccccacacgtcccagacctgactctgattgaccttcctggaatcaccagggtggctgtaggcaaccagccttcagacataggacggcagatcaagagacttatcactaactacatccaaaaacaagagaccatcaacctggtggtggtccccagcaatgtggacattgccaccacagaggccctgagcatggctcaggaggtggaccctgatggggataggaccatcgggatcttgaccaagcctgatctggtggacagagggactgaagacaaggtcgtggatgtggtgaggaacctcgtgtgccacctgaagaagggctacatgatagtcaagtgcaggggtcagcaggacatccaggagcagctgagcctggctgaggctcttcagaaggagcaagtcttcttcaaggaacaccctcaattcagagctcttctggaggatgggaaggccacagtgccctgcctggcagagaggctgaccatggagctcatctcacacatctgtaaatctcttcctttgttagaaaatcaaataaaggaaagtcaccagagtacaagtgaggagctgcagaagtatggtgcagacataccagaagatgagaatgaaaaaactctcttcctgattgaaaaaatcaatgcttttaaccaggacatcactgccatagtagaaggggaagagattgtgagggagaaagaatgtcgcctattcaccaagctccgtaaagagttcttcttgtggagtgaggagatcgaaaggaatttccaaaaaggttctgatgctttatataaagaagtctacacattcgaaatgcagtatcgtggccgagaactaccagggtttgtgaattacaaaacatttgagaacatcataagaagacaaatcaaaaccctggaagaaccagctatggaaatgcttcacaaggtcactgaaattgtacgggctgcctttacaacggtttctgagaaaaatttctctgagttttttaatctccacagaactaccaagtccaaacttgaagacatcagattagaacaggaaacggaagcagagaaggcgatccggcttcacttccagatggaacaaatcatctactgccaggaccaaatttataggaaagccttgcagaaggtgagagaggaggaagctgaggaggaggagaggaagcatggcaaaagcaggtccgctcagtccccaaatttacagacctcatccatggatgaaatcttccagcatctgaatgcctaccgccaggaggctcacaactgcatctccagccacattccattgatcatccagtatttcatcttgaagatgtttgctgagaagctgcagaagggcatgctccagctcctgcaggacaaggattcctgcagctggctcctgaaggaaaagagtgacaccagtgagaagaggagattcctgaaggagcggttggcaaggctggcccaagctcagcgcaggctagccaaattccctggttaagctggccctgtcctttcctgtgtctcctggataattaaatattcagggacagaagggttccagccttgttgtggtttgccctaagatatctgtattttgatgctaattccactgccccagggacagctgcctagtcctgtactcaggaatcaggtgacttcaccagaaacttctccccattgaatttgtaaaatacaggtgaggggcacatagaggatagaaagaggcctgtaattggaccagaagtaaggattggtgggagagaagtttaaaggaaggggaggatactggaagggaaagaaggagaggagagagatagagagaagccatggcaggacaatatggcaggtgacattaagattccatgctgtacctttacaggttgttacaaatgttcttaagggatggatggtactgggctttgtatgtttaggtgggcaattatatcttaccaattgggtc

SEQ ID NO: 4214 - DNA, 1880 bp, Rattus norvegicus
  Genbank Accession No. X52815
gggggggggggctgccgatcgcaatggaagaagaaatcgccgccctcgtcattgacaatggctccggcatgtgcaaagctggctttgctggggacgacgcccccagggccgtgtttccttccatcgtcgggcgcccccgacaccagggtgtcatggtgggcatgggccagaaagactcgtacgtgggtgatgaggcccagagcaagaggggtattctgaccctgaagtaccctattgagcacggcattgtcaccaactgggacgacatggagaagatctggcaccacaccttctacaacgagctgcgtgtggcccctgaggagcacccggtgcttctgaccgaggcccccctgaaccccaaagctaacagagagaagatgacgcagataatgtttgaaaccttcaataccccagccatgtacgtggccattcaggcggtgctctccttgtatgcatctgggcgtaccactggcattgtcatggactctggtgacggggtcacacacacagtgcccatctatgagggctacgcccttccccacgccatcttgcgtctggacctggctggccgggacctgacagactacctcatgaagatcctgactgaaaggggctacagctttaccaccactgctgagagggaaattgttcgtgacataaaggagaagctgtgctatgttgccctggattttgagcaagaaatggctactgctgcatcatcttcctctttggagaagagttatgagctgcctgatgggcaggtgatcaccattggcaatgagcgcttccggtgtccagaggctctcttccagccttccttcctgggcatggagtcctgtggcatccacgagaccaccttcaactccatcatgaagtgtgatgtggacatccgcaaagacctgtatgccaacacagtgctgtctggtggtaccaccatgtatccaggcattgctgacaggatgcagaaggagatcacagccctggctcccagcacaatgaagattaagatcattgctcctcctgaacgcaagtactcagtctggattggcggctccatcctggcctcactgtccaccttccagcagatgtggatcagcaagcaggagtatgacgagtcaggcccctccattgtccaccgcaaatgcttctagatggactgagcaggtgccaggcatctgctgcatgagctgattctgaagtatcgatttgccctggcaaatgtacacacctcatgctagcctcatgaaactggaataagcctttgaaaagaaatttgtccttgaagcttgtatctgatatcagcactggatcgtagaacttgttgctgatttttgaccttgtattcaagttaactgttcccttggtatatgtttaataccctgtgcatatcttgatttagtccttagttcatgtggctcggtcacttggtggctggggagatctgtggaaaagtcagtcagtccccagcctagtggatctctgtgagcaccatgtagtgatctgtgcagggtattaaccaacagcagacttccaggatttcccgaggctggcaagggttcctgaactagttaccacttcttttcttgccagtctaacagggtgggaaagtccgagccttaggacccagtttctgttctggttttttccctcctgacctccatgggttgttacttgccttgagttgggaacgtttgcatcgacacctgtaaatgtattcatccttttaatttatgtaaggtttttgtactcaattctttaagaaatgacaaattttggttttctactgttcagtgagaacattaggccccagcaacacgtcattgtgtaaagagaaataaaagtgctgcagtaaaaaaaaaaaaaaaccccccccccccccc

SEQ ID NO: 4215 - DNA, 535 bp, Rattus norvegicus
  Genbank Accession No. X53378
ctctttgcttccagacctccgccatcatgggtcgcatgcacgctcccgggaagggcctgtcccagtcggcgctgccctaccgccgtagcgtgcccacgtggctgaagttgacgtctgacgacgtgaaggaacaaatttacaagttggccaagaaaggcctgactccttcccagataggtgtgattctgagggactcacatggtgtggcacaggtccgttttgtgaccggaaataaaatcttgagaatccttaagtccaaaggccttgcccctgatcttcctgaggatctctaccatttgatcaagaaagcagttgctgtcagaaagcaccttgagaggaacagaaaagataaggatgctaaattccgcctgattctaattgagagcagaattcaccggctggctcgatactataagactaagcgggtgctcccacccaactggaaatatgagtcatccacagcctctgctctggtggcataaatgctgttgcgtacacaagcaataaaatcactttgagtaaaaaaaaaaaaaaa

SEQ ID NO: 4216 - DNA, 664 bp, Rattus norvegicus
  Genbank Accession No. X53504
ctttcggttcggaggaggcaacggtgcaactttcttcggtcgtcccgaatccgggttcatccgacaccagccacctccaccatgccgcccaagttcgaccccaacgagatcaaagtcgtgtacttgaggtgcaccggaggcgaggtcggcgccacatccgccttggcccctaagatcggtcctctgggtctgtctcccaaaaaagttggtgatgacatcgccaaggctaccggtgactggaaaggcctcaggattacagtgaaactgaccatccagaacagacaggcccagattgaggtggtgccctctgcctctgccctgatcatcaaagccctcaaggagccaccaagagacaggaagaagcagaaaaacattaaacacaatggaaacatcacttttgatgagattgtcaacattgcccggcagatgagacaccggtctttggccagagaactttctggaactatcaaggagatcctgggtactgcacagtctgtgggctgcaatgtggacggccgccaccctcatgacatcatagatgacatcaacagtggtgcggtggagtgcccagctagttaagaagcaacgagaaggggttgggaatttagctcagtggtagagcgcttgccaagcccaaggccctgggttcagtccccagctccgg

SEQ ID NO: 4217 - DNA, 2750 bp, Rattus norvegicus
  Genbank Accession No. X53565
cagactacaggatgcagttcctggttgcgttgctcctgctgagtgtcgcggtggcgagagctctgccatccgcttctaagccaaacaacacatcaagtgaaaataatcctccgattcaaccttccacgcccctgcctcctggggttgatatttctcaacaggtaaagactaacagaccgactgatcagaggctggagtcggataaagaaggccaggacaagacggtggctaggacttcggcatcagtttccagtggggtggaatctgcgaccaatctcaatttggatgattccaaaaagcaccccgaaacagcagatgccaaattgaaggaaactttgcagcagcttttgcctgtggaccccaaacaggaaaagtcaggtcagaagtttacaaaagattcaggcagccccacaggaggtgattccgacaataccacaggaggtgattctaacaagaccacaggagttgattctgacaagacatcaggaggtgattctaacaagcccacaggaagtgataatgacaagcccacaggaggtgattctaacaagcccacctccaaagtcccctccaatacagagactccaaaaattgacaaagtccagctaactgaaaaaggacagaaaccaacacttatttccaaaactgaatctggggaaaaactggcaggggactctgacttctctttaaagccagagaaaggagataagtcttcagagcctactgaagatgtggaaaccaaggagattgaagagggtgatacagagcccgaagaaggttcgccacttgaagaagagaatgaaaaggtgttgggcccttcctccagtgagaaccaagaggggacacttacagattctatgaaggatgagaaggatgaccattataaggacaattctggaaacaccagtgcagaaagcagccacttctttgcttatctggtgaccgctgctgttcttgttgctgtcctctatattgcttaccacaacaaacgaaagattattgcttttgccctggaaggaaaaagatccaaagtcactcggaggccaaaggccagtgactaccaacgtttgaacctaaagctttgattttgattttgtctgcaagaaccttgtcctccctgctgatttgtttccgaatcaagagaaatgaaaagactgacctgtggggtttggtggcaagtctgggctggcagagatgggattgcttcaggttttgcacctgcactttgatgacagtcctctggtggtgttttatttacttttgtgttccctttatgtgatgtgtccatcttccttccattcttggagtacaagcagagggagtgtgtggaaacatggctgtgaccaaaggaagaccccaccttccttaggcaggccacactatggaccaccctcccataacccctttatctttgcaactctaggagcaaactacagaggtgctttctagacaagatgtagaagatgattctgtgggatgctgatgggcagagacagggttgaaatcttctccacagaggcctcagctgcagaccagactagcaagttaaagagtgtcaaggtccagtccgtctgacagtctgtatatctctctgaaatttgcactcgagttgtgctagcacaaaagggactcactgcttctgaaagtaaaatcactgtgccatgggatttttttttttttaaatatggtgatgattattgaactgaaccagtgtgttcttgcatacagtcaccccaataggaacttcctggaaagaagcaaggtttatgccttgtggaagaaaacacatagggctttggtatacaggaaagagtttctcacagtcagttttgctttcatggtctgcagtaggtaagatagacatttagaaactccgtgcgttctccacattcctccacactgtttaagatgccagggaatgagtaatatctttcctatcctgtcatagctactcatgaaattgtaagaaaccaagtaggttccctgagataaccaaagatgtcttggattatgctgtgtctaaagttttattccagtctatatggttacacctaaagagagaaaactcttaactaatctcagggatataaaaggaaccaaaaatctgagtcctgtgcagttggagaagttgaagaagacctggtcttggagctctttctccatgctgactgtagcatgtgcctgaagtttgtatgcttggcaggtggcattctagaaatgaggtcattgctactgtcttcccgactgtgcataagtctgctgttactttttcctagctgagaagccgttttcagtctccctcagctttccgtaactcttcttcagttccccacctcttccattctctcttcctctttagccctgtttgtacacctctgatgaaaacctttccttctagcctacgtgcatgccatccctaccccgttccagttggtgttgcttctattcccttccctctctccctgacatttgcaggtttgccttggtctgttttcctcctgtttctcaaggttactcagttaacagatcaccaaataaaacagcccattttcacagcttataacacttggtaatgatggatgctggggtctgtgcatgttgacattctaggtgtctcttgcaaactgtcctttgccttatcttatggcgttgggggagggtgcccaggtctctcttgctttgactgtcgcatccattatttatcctttctgtgacctcacatttctttggtctccttcccaagaacccag

SEQ ID NO: 4218 - DNA, 1481 bp, Rattus norvegicus
  Genbank Accession No. X53944
ctctgaagagcctgatttagcccacattgctgtctgtcttttcctaggaacattttggagtcgcgttcctctgtgtgggccatggcacctctgagccagataagcacccacctcaactccacctgcggggcagaaaactccactggcgtcaaccgggcccgtccgcacgcctactacgccctgtcctactgtgctctcatcctagccatcatctttggcaacggcctggtatgtgctgctgtgctgagggagcgtgccctgcagaccaccaccaactacctagtggtgagcctggctgtggccgacctgctagtggccacgttggtgatgccgtgggtggtgtacttggaggtgacaggtggagtctggaatttcagccgcatttgctgtgacgtttttgtcaccctggatgtcatgatgtgtacagccagcatcctgaacctctgtgccatcagcatagacaggtacacagcggtggtcatgccagttcactatcagcacggcaccgggcagagctcctgtagacgtgtggcactcatgatcacagctgtgtgggtgctggcttttgctgtgtcctgccctctcctctttggtttcaacacaacaggggatcccagcatctgctccatctccaaccctgattttgtcatttactcttcagtggtgtccttctacgttcccttcggggtgactgtcctggtctatgccaggatctacatagtcctgaggcaaaggcaaagaaaacggatcctcactcgacagaacagccagtgcatcagtatcagacctggctttcctcagcagtcttcctgtctgaggctgcatcccattcggcagttttcaataagggccaggtttctgtcagatgccacaggacaaatggagcacatagaagacaaacaatatccccagaaatgccaggacccccttttgtcacacctgcagcccccctcacctggtcagacacatggggggctgaagcgctactacagcatctgccaagacactgccttgagacacccaagcttggaaggcggggcagggatgagccccgtggaaaggactcggaactccttgagccccaccatggcacccaagctcagcttagaggttcgaaaactcagcaacggcaggttatccacgtccctgaggctggggcccctgcagcctcggggagtaccacttcgagagaagaaggccacccagatggtggtcattgtgcttggagccttcattgtctgctggctgcccttcttcctgactcacgttcttaatacccactgtcaagcatgccacgtgtccccagagctttacagagccacaacgtggctaggctatgtgaacagtgccctgaatcctgtgatctataccaccttcaatgtggagttccgcaaagccttcctcaagatcctgtcctgctgaaggaggagaagagaccgcactcctttaccacttcgagatgccaggcagtttgaaccctg

SEQ ID NO: 4219 - DNA, 1362 bp, Rattus norvegicus
  Genbank Accession No. X54096
ggcacgaggcactgggctgtaatggggctgcctggctccccttggcagtgggtgctgttgctgttggggctactgctccctcctgccacctccttctggctcctcaatgtgctcttccccccgcacaccacgcccaaggctgaactcagtaaccacacacggcctgtcatcctcgtgcctggctgcatggggaaccggctagaagccaagctggataaaccaaatgtggtaaactggctgtgctaccgaaagacagaggacttttttaccatctggctggatttcaacatgtttctacccctcggggtggactgctggattgataacaccagggttgtctacaaccgaagctctgggcacatgtccaatgcccctggtgtacagatccgtgtccctggctttggcaagacctactctgttgaatacttggatgacaacaagctagcaggctacctgaacacactggtgcagaatctggttaacaatgggtatgtgcgggatgagacagtgcgggccgcaccctatgactggcgtctggcaccccgccagcaggatgaatactaccagaagctggcaggactggtagaggagatgtatgctgcttacgggaagcctgttttccttattggacacagccttggctgcctacatgtgctccatttcttactgcgtcagccacagtcctggaaggaccacttcattgatggcttcatctctctcggggccccatggggcggttccatcaagcccatgcggatcctggcctcaggtgacaaccagggcatcccgatcatgtccaacataaagctgagagaagaacagcgcataaccacaacttccccctggatgtttccagctcaccacgtgtggcctgaagaccacgtgttcatttccacaccaaacttcaactacacaggccaagacttcgagcgtttttttgcagatcttcattttgaagaaggctggcacatgtttctacagtctcgtgacctactagcaggcctcccagcgcctggtgtagaagtatattgtctatacggtgtaggcatgcccacagcccacacctacatctatgaccacaactttccctacaaagacccggtggctgcactctatgaagatggggacgacactgtagccacacgtagcactgagctctgtggccaggtgcagggccgccagtcacagggtgtacacttgctccgcatgaatgggacagatcatctcaacatggtcttcagcaataagacactggagcatattaatgctatcctactgggtgcctacccgcatggcactcctaagtccccaaccgccagcctaggtcccccaccaacggaataaagacttactgttatgaaa

SEQ ID NO: 4220 - DNA, 2812 bp, Rattus norvegicus
  Genbank Accession No. X55153
gggatggatccctggatggggccgtctctggatgacctttttctcattctctgctccaaacgttgtctctgtatttccttctgtgaatattttgcagaaccacaatttgaactcctagctaccgacccagcccacgtgcaagacgaaaagggtagaagggagggatcttccggtattaaggtgttaacagtgatgcatcttgggacttgtagttcgcctcaatacgacctgggcggggctccgattgcacgttgggagctgtggagccgtgtggcatgctgggaacgtgaggcgaaaaaggggattgaaaattttcgcccgtgtccccatggatttcgggagactctcgcctatgttacaggagcacttggcacttgaaaaaactcttgtttttgttgtgggaaacacatgaccggggacaaggcaaatttcttgcttccggcgcacccttatcgtcaataggaggcgcccctccgcggcttgttcccggagacttctgggtagcggtttacccccgcccactgcgtcagcatcttcctttcgccgccggacgccgccgaggtcgcacgcgtgaggtctgtccaccgcaaccgagtgagtaccctggccggctggggcgcagatagtggttgggactgagggatggaccgcggccgggagccgagggttgcatattttccgtgatcggaggcctggtgcctcacatggtctcacttgctggttaacaaggagtgggaagcagaaggcctctagggaaacctcaccaccgtaccttccttctctctgtcccattcagcatgcgctacgttgcctcttatctgctggccgccctcgggggcaactccaatcccagcgccaaagacatcaagaaaatactagacagcgtgggcatcgaggcggacgatgaacgactcaacaaggtagcttgctgctcactaggacccactggatccaaatgtctactagtagcggtccttaaatgttaggtccggattttacccttagagaaaatgtataggacctgttgaaaagggtggaaggaggaggcctacacccgtcttagtcatagttttctctttaatccttttgaggaccttgtgcaagtcaaagaaaatccgggcatgacaaaagtcctgctcatcgtgcttttgtagaagtttaatactactcgcttgtgggacttttgagatcaggtttactgtgtagctctgactaacctggaacgcactgtgtaaactagtttccttaactttttcctttttgaaactaacttggcagtaaaggatttacgcccacaagtgagaaacatctggtctccctggatctatagttagggttagctgataaatgtaagtgctgggagtcaaactcttaagatatggtgagtccgagctgtacagtgtgatcttacctggaaaagaacaggtcttcacagaatcttagaattttagtacctaaaacttgccactgccaacatctttgttgagaagacccagtactgtctcacggctagttactggggtagggtacaagtaggacaccttcccgtgtctgtctgtcttgcattactgactgctggttgtggttgtctattccaggtcatcagtgagctgaatggaaagaatattgaggatgtcatcgctcagggtgagttcctgggaagtgaacatgtttgtggtccatcctaatccctgctggtcagcccgtgatctgccaggcttcgcttgtggaccagagcatcctagaaaccctgccagagttgtgcgaggcctttttgtgtgcttgtgccggcagcgcttctgaacacgctggagctggcaatggggtcatttgttgattgctcctaccaggatgtgaaagccttttctgtgagcagggactgggggcactaaaaaattggtgcaggctctttcttaacttttattaggcatacagatttctggtaccaccagactacatcttatttgcaatctgaacagttaactgcacacgagaagcaaaaccagctcagcaactgacctagttagtctgtgaacctcaccccaaaagagctttgggcattgggtcacgctcatggtaaacacgttctcttgatttttagttaactaaaagtttgtgggttttccttttttttatttttttaagattttatataagtacactgtctccatcttcagacacacgagaagagggcatcagatctcatcatagatggttgtaagccaccatatggttgctgggaattgaactcaggacctctggaagagcagtcagtgctcttaaccactgagtcatctctccagcccggaaaacaagtcttaaacagtattaatggtgttcctaagtgtgtgcaaagttgcattgtgttttagagtgaaagcaggtggcagtggtgttccttgtgttggtgagtctacccttacagaacagcctttctggctgggtctctgttctgtctggtctcatgttctttctattttaacataggtgttggcaagctggccagtgtgcctgctggtggggctgtggctgtttctgctgcccctggctctgcagctcctgctgctggttctgcccccgctgcaggtaaatagaggtctgatgagtgggtggtgatcaaagggggggttggtgctcagagtttattttattgttggccggggctcctgggaaaatctggatgcttactatggtgttcctccacagcagaggagaagaaagatgagaagaaagaggagtctgaggagtcggatgacgacatgggatttggcctgtttgattaagatcccctgccaataaagcctttttatgt

SEQ ID NO: 4221 - DNA, 999 bp, Rattus norvegicus
  Genbank Accession No. X56228
catcaggtgctctaccgagcgctggtctccaccaagtggctggcggaatccattcggtccggcaaggtggggccaagccttcgggtgctggacgcgtcatggtactcaccagggacccgccaggcacgcaaagagtaccaggagcgacacgtgcctggcgcgtccttctttgatatagaggagtgccgggacacgacttcgccttacgagatgatgctgcccagtgaggcccactttggggactacgtgggcaacctgggcataagcaacgacacacacgtcgtggtatacgatggagacgacctgggcagcttctatgcacccagagtatggtggatgtttcgtgtgtttggccaccgcacagtatcagtgctcaatggtggcttccggaactggctgaaggagggccacccggtgacatctgaaccctcgcggccagagccagccgttttcaaagccacactgaaccgctccctgctcaagacctatgagcaggtcctggagaacctccagtctaaaaggttccagctggtggattctcgggcccagggacggtacctgggcacacaaccggagcccgatgcagtaggactggactcaggccacatccgtggctctgtcaacgtgcccttcatgaacttcctgacagaagatggcttcgagaagagcccagaggagctgcgtgccatattccaggacaagaaggtggacctctcccagccccttatcgccacatgccgcaaaggggtcactgcttgccacattgccctggctgcctacctttgtggcaagcccgatgtggctgtttacgatggctcctggtcagagtggtttcgcagggcccccccggagacccgtgtgtcccaggggaagagtgggaaggcctgagtgtgtgcagcctcctcttccgcccaccagatccagccagttcccttcagtcaggcttgtatgacctgctgaaggttcgcctcttacgcaatggagattgacaggatttta

SEQ ID NO: 4222 - DNA, 2299 bp, Rattus norvegicus
  Genbank Accession No. X56327
ctttcccatctttgtctatgcttgaacttcagtctactagtccctctaagtctgaaacaaaaaggaaagattggaaaagacacccttgcaaatctcctgttgggagaaggaaccaaacagaaagaaagaaggaaagaaagagtaaatgctgtgaaaactgcagcaggagggctctttttcccaggcagggggtctacttgacactatcttagtaggaatgctatctaagtcttaccctcctggaccccacccctttctttcccagcctgttttgaccaatagtctcagagtcctgggggaggggaagtggggaaaagttcaggatgaagagtaaaaggacaggccttcagtctcttaaacacacttgcttctgcacacctgagattatttccaagcttctagacctcacaccatggttcacttcacagctgaggagaaggctgctatcataagcatatgggaaaaagtggacttggaaaaacttggaggagaaaccctgggaaggtagggtcagagaccaggactggggaggaatggagggaaattgtccttgtgcatggcagaaatttcctctagaacagtggtgttcaaccttcctaataacctttaatatagttactcatgtgatgaccctaaccataaacaattattttagttgctatttcataactgtaattttgatactgctatgtaaatatctgtcttttttgatggtgttaggtgaccccagtgaaagggtctttctactctcaaaggggccatgacatacatagcttgaaaaaccctgttctaggggtttgtgatatactctgacttttaaactgctatgttttaggctcctcattgtatatccatggactcagagattctttgacaagtttggaaacctctcttctgctccggccatcatgggtaatccccagatcagagcccatggcaagaaagtgctggtgtccctaggcttggcagttgagaacatggacaacctcaaggagacctttgctcatctgagtgagctgcactgtgacaagcttcacgtggatcccgagaactttaaggtcactttgagcacgcttatgtgtttaatttaaatttgacatggggaaaagaataaaagttaatgccttgttttgttatgctgggccagatctcaaaacatgcggttatagatcttgtgtcaactaattgctagaaacatttgcaactgcccagaaaagtttttcagacagacatttgctgtctcggtaactcagctgatgtaatgcctctctgggatatatgaatcctgagactggaacactactaacaaagcacaaaggggcagagtcttagagttggttacagaatcctcctcactctgtgttttattttagaaggtagcacatacatgtaagtggaagtagcccttgaaattgacattttgttttagggaagggagaaatacctcattttgtggattctaatgattgacacttcaggaaagatagaagagaaatttttgacagatttttcccaattggtttgataaacttcctaaaaaatgctacaattttaatgaataatatcataagtagtgcattcttccttcattattggagacttgaactccagcaaacatgttgttacactgaaattgtgcatttagtgaagccaggccctgggtgaatgagaaaaggggcaagagacaaaaatagcagactgaagaaatgttaggtgcaagcaggagaggatctaatgagctcagggagggcaggcccttgagcagtgaaattgagccaacctcctcactagagtggataggttgctggggagtcctcaagaaagataacttacaaataccatttttcctataaattcttttctgtatctccttttctcatttttgtgtatccttttgtgtttcctttcacagctcctgggtaacgtgctggtgattgttctttcttcttacttcggcaaagaattcacagctgaggtgcaggctgcctggcagaagctggtggctggggtggccactgctctgtcccacaagtaccactgagccccttccctgacttccagcattctgcatatccccagctctgtcctacacatgaccactctgctggtctctgcaagcaagacttctacttaataaagtccattctcctcagtaatccatgagtcatattttgtcctatctgttccttttgtgtttaaagaaaaaagactgatggacagaaaggaagggagagacacagaagtttctttgaaaactgtgttggcagttaggagaggagagtagatgttatagaatttt

SEQ ID NO: 4223 - DNA, 2674 bp, Rattus norvegicus
  Genbank Accession No. X57523
  misc_feature (1)..(2674): n = a or c or g or t
cgcggagagttccaggctgggaccggactctggacagcgcacgctcgatggctgcgcacgcctggccgacggccgccttgctgctgctgctggtggactggctgctgctgcggcccgtgctcccgggaatcttctccctgttggttcccgaggtgccactgctccgggtctgggccgtgggcctgagtcgctgggctatcctgggactaggggtccgcggggtcctcggggtcaccgcgggagcccgtggctggctggctgctttgcagccgctggtggcggcgctgggtttggccctgcctggacttgcctcgttccgaaagctgtccgcctggggagcactccgggagggtgacaacgctggactgctccactggaacagtcgcttagatgccttcgttctcagttatgtggccgcattgcccgcagctgccctgtggcacaagttggggggcttctgggcgcccagtggccacaagggcgctggagacatgctgtgtcggatgctaggcttcctggactccaagaaggggcgtctccacctggttctggttctcttgatcctctcctgccttggggaaatggccattcccttcttcacaggccgcatcactgactggatccttcaggataagacagcccccagcttcgcccgcaacatgtggctcatgtgtattcttaccatagccagtacagtgctggagtttgcaggagatggaatctacaacatcaccatgggccacatgcacagccgcgtgcatggagaggtgtttcgggccgtccttcaccaggagacaggatttttcctgaagaacccaacaggttccatcacatctcgggtgactgaggacacctccaacgtgtgcgagtccattagtgacaagctgaacctgttcctgtggtacctggggcgaggcctgtgtctcctggcgttcatgatttgggggtcattctacctcactgtggtcaccctgctcagcctgcctctgcttttccttctgcccaggaggctggggaaagtgtaccagtcactggcagtgaaggtgcaggagtctctagcaaagtccacgcaggtggccctcgaggccctgtcggcgatgcctaccgtacggagctttgccaacgaggagggagaggcccagaagtttaggcagaagttggaagaaatgaagccgctaaacaagaaagaggccttggcttacgtcactgaagtctggaccatgagtgtctcgggaatgctgctgaaggtgggaattctgtacctcggtgggcagctggtggtcagaggggctgtcagcagcggcaacctcgtctcctttgttctctaccagcttcagttcaccagggccgtggaggtcctgctctccatctatccctccatgcagaagtccgtgggcgcttcggagaaaatattcgaatacctggaccggactccctgctctccgctcagtggctcactggcacctttaaacatgaaaggcctcgtcaagttccaagatgtctcctttgcctacccaaaccatcccaacgtccaggtgcttcaggggctgacttttacgctgtatcccgggaaggtgaccgccttggtgggacccaatgggtcagggaagagcaccgtggccgccctgctgcagaacctgtaccagcccaccgggggcaaggtgctcctggatggcgagcccctggtccagtatgatcaccactacctgcacacgcaggtggccgcagtgggacaagagccactgctatttggaagaagttttcgggaaaatattgcctatggcctgacgcggactccaaccatggaggaaatcacagctgtggccatggagtccggagcccacgatttcatctctggattccctcagggctatgacacagaggtaggtgaaactgggaaccagctgtcaggaggtcagcgacaggcggtggccttggctcgagccttgatccggaagccacgcctgcttatcttggacgatgccaccagtgccctggatgctggcaaccagctacgggtccagcggctcctgtatgagagccccgagtgggcctctcggacggttcttctgatcacccagcagctcagcctggcagagcgggcccaccacatcctcttcctcaaagaaggctctgtctgcgagcagggcacccacctgcagctcatggagagaggagggtgttaccggtccatggtggaggctcttgcggctccttcagactgacgggcttctggactgcaagctgcgcgagtccctccccctgctgtcctctgctctgtgtggcggagaacctgggagcaaagattttaccacatccacggagatagttgaggagcgatggtgtttgttacatgaggaaaatgtaacctctaggagatgcccggaatttaccacnaatgttttcccgccccgccccctgttagacgggggatgggggtaggtaccccaggctaacactgagctgctgagtctcctgtctcccgtggagtttgcatcacggcatgcgcccacaaacctggcttatgtggcgttgggacagaatgagaagaaacgctcaaaatgtacagagaaggggcaaatagcttgcaattaaccaaaggcataggctggcctatgggtgttccgcgggttcttgatatttataataaaactggtgttttgtaaaaaaaaaa

SEQ ID NO: 4224 - DNA, 516 bp, Rattus norvegicus
  Genbank Accession No. X57529
cacaggaggcctacacgccgccgcttgtgccgccgccatgtccctagtgatccccgagaagtttcagcacatcctgcgagtactcaacaccaacatcgatgggcggcggaaaatagccttcgctatcactgccattaagggtgtggggcggagatacgctcatgtggtgttgaggaaagcagacattgacctcaccaagagggctggggagctcacggaggacgaggtggagcgtgtgatcaccatcatgcagaacccacgacaatacaagatccctgactggttcttgaacagacagaaggacgtgaaggatgggaagtatagccaggttctggccaacggtctagacaacaagctgcgtgaggacctggagcggctgaagaaaatccgagcccatagaggactgcgccacttttggggccttcgtgtccggggtcagcacaccaagaccactggccgcaggggccgtactgtgggtgtgtccaagaagaaatgagtctttgggcctttgctgtt

SEQ ID NO: 4225 - DNA, 2137 bp, Rattus norvegicus
  Genbank Accession No. X57986
gccgcgtcgcagctccgagactggccccggccgcgacgccgccgcgatgggcaacgccgccgccgccaagaagggcagcgagcaggagagcgtgaaagagttcctagccaaagccaaggaagatttcctgaaaaaatgggaagacccctctcagaatacagcccagttggatcattttgatagaatcaagacccttggcaccggctcctttgggcgagtgatgctcgtgaagcacaaggaaagtgggaaccactatgccatgaagatcttggacaagcagaaggtggtgaagctgaagcagatcgagcacactctgaatgagaagcgcatcctgcaggctgtcaacttcccgttcctggtcaaacttgaattctccttcaaggacaactcaaacttgtacatggtcatggagtacgtgcctggtggggagatgttctcccacttacggcggattgggaggttcagtgagccccacgcccgtttctacgcggcgcagatcgtcttgacttttgagtatctgcactccctggacctcatctaccgggacctgaagcccgagaaccttctcatcgaccagcagggctatattcaggtgacagacttcggttttgccaagcgtgtgaaaggccgaacttggaccttgtgtgggacccccgagtacttggcccccgagattatcttgagcaaaggctacaacaaagctgtggactggtgggctctcggggtcctcatctacgagatggctgctggttacccgcccttcttcgctgaccagcctatccagatctatgagaaaatcgtctctgggaaggtgcggttcccatcccacttcagctctgacttgaaggacctgcttcggaaccttctgcaggtggatctcaccaagcgctttgggaatctcaagaacggggtcaatgacatcaagaaccacaagtggtttgccacaactgactggatcgccatctatcagagaaaggtggaagctcccttcataccaaagtttaaaggccctggggacacgagtaactttgacgactatgaggaggaagagatccgggtctccatcaatgagaaatgtggcaaggagtttactgagttttaggggtgtgcttgtgccccatgggttttcttttcttttttttttttctttttctttctatttttttttctggttgggggtgggggggttggatcgaacagccagagggccctagagttccatgcatctaatttaacatccactccacacccccagggttaaggagagcaggaaagtcagatactggggaaggggcaacatcagctgctccccctctcccttcacctccaccctgcccttcctgttttcaatgaatttcttagctccagtcatactcaatcttgctggtgtatccaggggcgagtagggaaagagggccccaaattcagcctccacccctaccccagcactggatactaaggatgaacagtaaagccaaccttcccttccatgcagccctacctggaaagggagattttatgacctatacagagggctgcttgccagtggggttttttttttttttttcctcatttaaattaagttccaccagtgcctcccaccctccaaattgtcccacccctctcaaccccacccccactccctaaatccattctgatgagacccgggtagccaactgactctgtcaaggaaggaactgggcttggaacctcgccctgagctgctagcctcccggcccccctttccagtggtctcatgccaattgttctgtgcaccagcccccctaagaagcccctccccatcctgggcgctcacttctagcttagctgtcagctgtccatcacctcttgccgtgtgtccccactcactgcacccccaagtctgattgtgctttttctctcaatagaaaggtggggagctgctggggatatgaccccgtttatccctgtgtttatccctctcgtaacttctcccaaaaaggaggagctctcaggcctgggtgggggccccgggtgggcgagaggggccgttcaacctgtgtgcttcgaaggatgagacttcctcttgaacagtgtgctgttgtaaacatatttgaaaactattaccaataaagttttgttttaaaaaaaaaaaaaa

SEQ ID NO: 4226 - DNA, 499 bp, Rattus norvegicus
  Genbank Accession No. X58200
ctctttccggacgctcaagatgtcgaagcgaggacgtggtgggtcctccggagcgaaattccggatttccctgggtcttccggtaggagctgtgatcaactgtgctgacaacacaggagccaaaaacctgtatatcatctctgtgaagggaatcaagggacggctgaacagacttcctgctgctggtgtgggcgacatggtgatggccacagttaagaaaggcaaaccagaactaaggaaaaaggtacatcctgcagtggtgattcgacaacgaaagtcatatcgaagaaaagacggggtgttcctttattttgaagataatgcaggggtcatagtaaacaataaaggcgagatgaaaggttctgctatcacaggtccagttgcaaaggagtgtgcagacttgtggcccaggattgcatccaatgcaggaagcattgcctgattctccagtgtgtttgtaaaatatattcattaaagtcttctctctgaaaaaaaaaaa

SEQ ID NO: 4227 - DNA, 628 bp, Rattus norvegicus
  Genbank Accession No. X58389
cctgttagcggccagaggtaacctgtgaagatggttcgctactcccttgacccagaaaaccccacgaaatcatgcaagtcaagaggctcaaaccttcgtgttcactttaagaacacccgggaaactgcccaggccatcaagggtatgcatatccgcaaagccaccaagtatctgaaggatgtcactttaaagaagcagtgtgtgccattccggcggtataatggtggagtcggtaggtgcgcccaggccaaacagtggggctggacacagggacggtggccaaaaaagagtgctgaatttttgctgcacatgcttaaaaatgcagagagtaatgctgaacttaagggtttggatgtagactctctggtcattgaacacatccaggtgaacaaggctcctaagatgcgcagacgaacctacagagctcacggccggattaacccatacatgagctccccctgccacatcgagatgatcctcactgagaaggaacagattgttccaaagccagaagaggaggttgcacagaagaaaaagatatcccagaagaaattgaagaaacaaaagctcatggcacgggaataaattcagcataaataaatgcggataaagtaaaaaaaaaaaaaaa

SEQ ID NO: 4228 - DNA, 744 bp, Rattus norvegicus
  Genbank Accession No. X58465
ctcttcctgtctgtgccagaactgcgcgtggtccgcgccgatcgactgagaagcccggtttgcgctctcagaatgactgaatgggaaacagccacacccgcggtggcagagaccccggacatcaagctctttgggaaatggagcactgatgatgtgcagatcaacgatatttctctacaggattacattgctgtgaaggagaagtatgccaagtacctgccccacagtgcaggacggtatgctgccaacggtttccgcaaagcacagtgtcccatcgtggagcgccttactaactccatgatgatgcacggtcgtaacaacggcaagaagctcatgactgtacgaattgtcaagcatgcctttgagatcatccacctgctcactggtgagaaccctctgcaggtcctggtgaatgctatcatcaacagtggcccccgagaagactcaacacgcattgggcgggctggaacagtgagacggcaggctgtggatgtatccccacttcgccgagtgaatcaggccatctggctgctgtgcacgggggctcgtgaggctgctttccggaacatcaagaccatcgctgagtgccttgcagatgagctcattaatgctcgcaagggctcctccaactcctatgctatcaagaagaaagatgaactggagcgtgtggccaagtctaaccgctgatttcccagctgctgcctaataaattgtgtgccctttgggacagttacatcaaaaaaa

SEQ ID NO: 4229 - DNA, 2697 bp, Rattus norvegicus
  Genbank Accession No. X59267
gtcggtccgcccgtgcgtgcgtctgtccgttcggcctccgtccggcccgcagcatggccggcgtcagcttcagcggccaccgcctggagctgctggcggcgtacgaggaggtgatccgggaggagagtgcagccgactgggctctgtacacttacgaagatggctcagatgacctcaagcttgcagcatcaggagaaggaggcttgcaggagctttcaggccacttcgagaaccagaaagtgatgtacggtttctgcagcgtcaaggactcccaggctgccttgccaaaatatgtgctcatcaactgggttggtgaggatgtgcctgatgcccgaaaatgtgcttgtgccagccatgtggccaaggtggctgaattcttccagggcgttgacgtaattgtgaatgccagcagtgtggaggatatcgatgctggcgccattgggcagcggctctccaatggactggctcggctctctagcccagtgctgcaccgcctgcgccttcgggaggatgagaatgctgagccggtgggcaccacctaccagaagacggatgcggccgtggagatgaagcggattaaccgtgagcagttttgggagcaggccaagaaggaggaggagctgcggaaggaggaggagcggaagaaggctttggatgccaggctcaggtttgagcaggagcggatggagcaggagcggcaggagcaggaggaacgggaacggcgctaccgagagcgggagcagcagatcgaggagcacaggaggaaacagcagagtctggaagctgaagaggccaagaggaggttaaaggatcagtctatctttggtgatcagcgagatgaagaggaagagtcccagatgaagaagtcggaatctgaggtggaggaggcagctgccatcattgcccagcggcctgataacccacgggagttcttcagacagcaggaacgagtggcttcagcctctggtggcagctgtgacgcaccctcgcccttcaaccaccgaccaggtcgtccgtactgccctttcataaaggcatcggacagtgggccttcctcctcctcctcttcctcctcttcccctccacggactccctttccctatatcacctgccaccgcaccccaaacctctcttcctccctcccatgcagtcacctggacagccaccggaggatggcgcccactcccattcccacccggagcccatctgattccagcacagcctccacccccatcacggagcagatcgagagggccctggatgaggtcacatcctcgcagcctccacccccacctccaccacccccaccagctcaagaggcccaggagtctgctcccagactggacggtgaagaggtctgcaaggaggccaaagtagcagcagctcctcaggtctgggctggctgtgcagaggagcctcctcgggcacaggaacctcccctgttgcaaagcagccccacggaggacttgatgtgcacagaatctcctgagcaggctgtcctggcggcctctccagagcctgatgcctctgtcacctcagtagctgatgctcatgcagctgacaccatcgagaccaccactgccactactgccaccactattgccgacaacgtcacccctgccgccgccagcctcattgatctgtggcctggtaacggggaagaggcctcaacgcctcaggctgaacccagggtgcccaccccaccctcaggtgctgaggcctccctggcagaggtgcctctgttgaatgaggcagctcaggagccgctgccaccagtgggcgaaggctgtgccaaccttcttaatttcgatgagctgccagaacctccagccaccttctgtgacccagaggaggaagccgaaggagagccgctggctgcctcccaggtcctaactatgccctcagccctagaggaggtagatcaggtgttggagcaggagttggagccagaacctcatctgctgaccaatggagagaccactcagaaggaggggacccagcaggccagcgaaggatacttcagtcagtcacaggaggaagaattcgcccaatcagaagagccatgtgcaaaggctccacctcctgtattctacaacaagcctccagaaatcgacatcacctgctgggatgcagacccagttcctgaagaggaagagggcttcgagggtggtgattagtagtggcgactgccccctggctgccctcgccaaggctgcccacctgcagtgcctctggccagccggcttgcagcgccagcattagcagcagccccgcctggctcccactctggattccggcactggccggggacctgtctgcttctctacccacagggcctgacttttacagcttttctcttttttttaaaagttgatagacttgtacaattgactggttttcctcccgttggtagttgaaacaatgttgcagattccacccccttcctgcccagaccagattgtagcttagtccttcctgctcagctgaccagggtggaggcctcaccctgcttgggacctggtgggggtcgggggttctggtgggaaaatgttcccccccatcacttttcctagttttatgtttcttggaaaaaaaatatcactttgtattctctatccagggcttcagatattttgcacgaaatttaaaacatggcaataaatggctcgtgggctctgaaaaaaaaaaaaaaaaaaa

SEQ ID NO: 4230 - DNA, 497 bp, Rattus norvegicus
  Genbank Accession No. X59375
aaagttgctgctaggcgctcgaaagcgagcacctcatctcagagatctggagcggccgcgcttgcggagctgtcaccatgcctctggctagagatctattacacccttccttggaagaggaaaagaaaaaacataagaagaaacggctggttcagagcccaaattcttacttcatggatgtgaaatgtccaggttgctacaagattactacagttttcagccatgctcagacagtggttctttgtgtgggttgttcaaccgtgctgtgccagcccacaggagggaaagccaggctcacagaaggctgttcatttagaagaaagcaacactaatcatctatacaagttcctgaattcgtgtttttcacagaaagccttatcaactttagttactctaccaagacaatgtaattattgtttgattttataaagtctacaacaatgatctcctattttggtgtcagtttttcaataaagttttacttatgaacaagttca

SEQ ID NO: 4231 - DNA, 15231 bp, Rattus norvegicus
  Genbank Accession No. X59601
atggtggctggcatgctcatgccactggaccagcttcgggccatctatgaggtgctctttcgtgagggggtgatggttgccaagaaggaccggcgaccccgaagcctgcatccccatgtgcccggcgtcaccaatctacaggtcatgcgtgccatgacctcgctgaaagctcggggcctggtgcgggagacctttgcctggtgccacttctactggtacctgaccaacgagggcatcgaccacctacgccagtacctacacctgccaccggagatcgtacctgcctctctgcagcgtgtgcgccgccctgttgccatggtgatgcctgcacgtcgtcgctccccccatgtgcagaccatgcaaggtcccttaggctgtccaccaaagaggggccctctgccagctgaggaccctgcccgggaggagcggcaggtctatcgcaggaaggagcgtgaggaaggggcacctgaaacccctgtggtgtctgccaccatcgtggggaccctggccaggcccggcccagagcccaccccagccacagatgaacgagaccgtgtgcagaagaaaacttccaccaagtgggtcaataaacaccttatcaaggctcaaaggcacatcagtgacctgtatgaagacctccgtgatggccacaacctcatctccctgctggaagtcctctcaggagacagcctgccccgagagaaggggaggatgcgtttccacaagctgcaaaacgttcagattgccctggactatctccgacatcggcaggtgaagttggtgaacatcagaaatgatgacatcgccgatggcaaccccaagctgaccctgggcctgatctggacaatcatcctgcacttcaagatctcagacattcaggtgagcggccagtccgaggacatgacagccaaggagaagctgctgctgtggtctcagcgtatggtagagggctaccaaggcctgcgctgtgacaacttcaccaccagctggcgcgacggccggctcttcaatgctatcatccacaggcacaagcccatgctcatagacatgaataaagtgtaccgacagaccaacctggagaacctagaccaggccttctccgtggcagagcgggacctgggagttaccaggctcctggacccagaagatgtggatgtccctcagcctgatgagaagtccatcatcacctacgtttcatccctgtatgatgccatgccccgtgtgccgggcgcacaggatggagtgagggccaatgagctgcagcttcgttggcaagagtaccgggagcttgtgctgctgctgctacagtggatccggcaccacaccgctgcttttgaggagcgcaagttcccctccagctttgaggagattgagatcctatggtgccagtttctgaagttcaaggagacagaacttcctgccaaggaggcagacaagaaccggtccaaaggcatctaccagtctttggagggagcagtacaagcaggccagctcaagattccccctggctaccacccgctagacgtggaaaaggagtggggcaagctgcacgtggccatcctggagcgggagaagcaactccggagcgagtttgagaggctggagtgtcttcagcgcattgtgagcaagctacagatggaggctgggctatgtgaggagcagctgtaccaggcggattccctactgcagtcggatattcggctgctggcctcaggcaaggcggcacagcgggctggggaagtggagagagacctggacaaggctgatggtatgatccggctgttgttcaatgatgtgcagacccttaaagatgggcggcatccacagggtgaacagatgtaccggagggtgtatcgtctgcatgagcgcctggtagccatccgcactgaatacaacctccggctgaaggcaggggtgggtgcccctgtgacccaggtgaccctgcagagcacacagaggcgcccagagctagaggactccacactgcgttacctgcacgacctgctggcatgggtggaggagaaccagcgtcgaatagacggtgctgagtggggcgtggacttgcccagtgtagaggcacagctgggcagccaccgaggcatgcatcagtctattgaggaattccgggccaagatcgagcgggctcggaatgatgagagccagctctcccctgccacccgaggtgcctaccgagactgcctgggccgcctggacctgcagtatgcaaagctgctgaactcctccaaggcccgcctccggtccctggagagcttgcatgggtttgtggcggcagctaccaaggagctgatgtggctgaatgagaaggaagaggaagaagtgggctttgattggagtgaccgcaacaccaacatggctgccaagaaagaaagttactcggccctgatgcgtgagctggagatgaaggaaaagaaaattaaggagatccagaacacgggggacaggttgctgcgggaagaccatcctgcccggcccacagtggagtccttccaggctgccctgcagacacagtggagctggatgctgcagctgtgttgctgcattgaagcgcacttgaaagagaacacagcctacttccagttcttctcagatgttcgggaggctgaggaacagttgcagaaactacaggagacgttacgcaggaagtacagctgtgaccgctccatcactgtcacaaggcttgaggacctgctgcaggatgcccaggatgagaaggagcaactgaatgagtacaaagggcacctctcaggcctggccaagcgggccaaggctattgtgcagctgaagccacgcaaccctgcccaccctgtgcggggtcacgtgcccctgctagctgtgtgtgactacaagcaggtggaggtgactgtgcacaagggtgaccaatgccagctggtgggccctgcacagccgttccactggaaggtgctcagtagttccggcagtgaggctgccgtgccttctgtgtgctttcttgtgccgccacccaaccaggaggcccaggaagctgttgctaggctggaggcccagcatcaggccctggttactctgtggcaccagcttcacgtggacatgaagagtcttctggcatggcagagcctcaatcgtgacatacagctcatccggtcctggtccctagtcacgttccgcacgctgaagcccgaggagcagcggcaagctctgcgcaacctggagttgcactaccaggccttccttcgagacagccaggacgctggtggctttgggcccgaggaccggctggtggcagagcgcgaatatggatcttgtagtcgccactaccagcagctgctacaaagcctggagcagggtgagcaggaagagtctcgctgtcagcgatgcatctcggagctcaaggacattcggctgcaactggaggcctgtgagactcggactgtgcaccgtctgcggctgccactggataaagaccccgcacgggagtgtgcccagcgcatcgctgagcaacagaaagcacaggctgaggtggaggggctgggcaagggagttgcccggctgtctgctgaggctgagaaagttctggccttgccagagccgtcacctgctgcaccaactctgcgctcggagttggaattgaccctgggcaagctggaacaggtcagaagcctgtctgccatctacttggagaaactcaagaccatcagcttggtaattcgcagtacccagggggctgaggaggtgcttaaaacacacgaggagcacctgaaggaggcccaggccgtgcctgccacactccaagagctcgaagtcaccaaggcttcactaaagaagctgcgggcccaggcggaggcacagcagcctgtattcaacaccctacgagatgagctgaggggggcacaggaagttggtgaacggctacagcagcggcatggtgagcgggacgtggaagtagagcgctggcgagaacgtgtcactcagttgctggagcgctggcaggctgtgctagcccagactgatgtgcggcagcgggagcttgaacagctgggccgccaacttcgctactaccgtgaaagtgcggatccgctgagctcctggctgcaggatgccaagagccggcaagaacagatccaggctgtgccaatagccaacagtcaggctgcacgagaacagctgcgccaggagaaggccctgctggaggagattgagcgccatggtgagaaggttgaggagtgccagaagtttgctaagcagtacatcaatgcaatcaaggactatgagctccagctgatcacctacaaggctcagcttgaacctgtggcctcccccgccaagaagcccaaggttcagtctggatcggagagcgtcatccaggagtacgtggatctgcgtacacgctacagtgagctgaccacactcacgagtcagtacatcaagttcatcagtgagacactgcgccgcatggaagaggaagagcggctggctgagcaacagcgggcagaggagcgggagcgcctggccgaggtggaggccgcgctggagaagcagcggcagctggctgaggcccatgcccaggccaaggcacaggccgagctggaggcacgagaactgcagcggcgcatgcaggaggaggtgacgcggcgcgaggaggcggcggtggacgcacagcaacagaagcgcagcatccaagaggagctgcagcatctgcggcaaagctcagaggcagagatccaggccaaggcccagcaggtggaggctgcagagcgcagccgcatgcgcattgaggaagagatccgcgtagtccgtctgcagctagagacaactgagcgtcagcgtggaggggcggaggatgagctgcaggctctgcgtgcacgggctgaggaggcagaagcacagaagcggcaggctcaggaggaagccgagcgcttgcggaggcaggtgcaggatgagagccaacgcaaacggcaggcggaggccgagctggccctgcgtgtgaaggcagaagcggaggcagcgcgagagaagcagcgggccctgcaggctctggatgaactgaaactgcaggccgaggaggccgaacggtggctgtgccaagccgaggcagagagggctcgccaagtgcaggtagccctggagacagcgcagcgtagtgcagaagtggagctgcagagcaagcgtccgtcctttgcagagaagaccgcacagttggagcgcacgctgcaggaagagcacgtgacagtgacacagctgcgggaggaggcggaacggcgggcacagcagcaggctgaagccgagcgagcccgtgaggaagccgagcgggagctggagcgctggcagctgaaggccaatgaggcgctgcggctgcggctgcaggcagaggaggtggcacagcagaagagcctggcccaggccgatgcggagaagcagaaggaagaggcagaacgggaagcccggcggcggggcaaggcagaggagcaggccgtgcggcagcgagagctggctgagcaggagctggagaagcagcggcagctgacagagggcaccgcccagcagcgcctggctgccgagcaggagctgattcgcctgcgggcagagacggagcaaggtgagcatcagcggcagctgctggaggaagagctggcccggctacagcacgaagcgacagcagccacacagaagcgccaggagctggaggctgagctggcgaaggttcgggcagagatggaggtactgctggccagcaaggcacgagccgaagaggagtctcgctccaccagtgaaaagtccaagcagaggctggaagctgaggcagggcggtttcgagagctggctgaggaggctgcccgcctgcgtgctctggccgaggaggcaaggcggcaccgggagttggccgaggaggacgcggcacgccagcgggccgaggcggacggagtgcttacggagaagctggctgccatcagtgaggccacaaggctcaagacggaggcagagattgcactcaaagagaaggaggccgagaacgagcgcctgaggcgcctggctgaagatgaggccttccagcggcgccggctggaggagcaggcagcacagcacaaggcagacatagaggagcgcctggcccagctgcgcaaggcatccgagagcgagctggagcgacagaaggggttggtggaggataccctgcggcagcggcggcaggtggaggaggagatcatggctctgaaggcgagcttcgagaaggccgcggctggcaaggcagaactggagctggagcttggccgcatccgcagcaatgccgaggacaccatgcgcagcaaggagctggccgagcaggaggcagcgcggcagcggcagttggcagctgaggaggagcagaggcgccgggaagccgaggagcgggtgcagaggagcctggcagcggaggaggaagccgcacggcagcgcaaggtcgcactggaggaagtcgagcggctcaaggccaaggttgaggaagcgcggcgcctgcgagagcgagctgagcaggagtctgcgaggcagctgcagctggcccaggaggctgcccagaaacggctgcaggcggaggagaaggcgcacgcctttgtggtgcagcagcgagaagaggagctgcagcagactcttcagcaagagcagaacatgctggagcggctgcggagcgaggcagaggcagcgcggcgagctgctgaggaggcggaggaggcccgggagcaggcagaacgtgaggcagcgcagtctaggaagcaagtggaagaggccgagcggctgaagcagtcggcagaggagcaggctcaggcccaggcccaggcgcaggcggctgcagagaaactgcgcaaggaagcggagcaggaggcggcgcgtcgggcccaggcggagcaggctgcgttgaaacagaagcaggcagccgacgcggagatggagaagcacaagaagtttgcagagcagacgctacggcagaaggctcaggtagagcaggagctgaccacgctgaggctgcagctcgaggagaccgaccaccagaagagcatcctggatgaggagctgcagcggctaaaggctgaggtaacagaggcagcccggcagcgtagccaggtagaggaggagctcttctctgtccgcgtgcagatggaggagctgggcaaactcaaggctcgcattgaagctgaaaaccgggcactcatccttcgtgacaaggacaacacacagcgcttcctggaggaggaggccgagaagatgaaacaggtggcagaggaagctgcacggttgagcgtagctgcccaggaggcagcaaggctgcggcagctagccgaggaggacctggcccagcagcgggccctggcggagaagatgctgaaggagaagatgcaggcggtgcaggaagccacaaggctcaaggctgaggctgagctgctgcagcagcagaaggagctggcacaggagcaggcccggcggctgcaggcggacaaggagcaaatggctcagcagttggtagaggagacacagggtttccagcggaccctggaggctgagcggcagcggcagctagaaatgagcgcagaggctgaacgcctcaagttgcgcatggctgagatgagccgggctcaggcccgtgcagaggaggatgcccagcgcttccggaagcaggctgaagagatcggcgaaaagctgcaccgcactgaactcgctacacaggagaaggtgacattggtgcagactctcgagatccagcgacagcagagtgaccaagatgccgagcgtctgagggaggccattgctgagctggagcgtgagaaggagaagctcaagcaggaggcgaagttactgcagctcaagtctgaggagatgcagactgtgcagcaggagcagatactgcaggagacacaggccctgcagaagagctttctctctgagaaggacagcttgctgcaacgcgaacgcttcatcgagcaggagaaggccaagctggagcagcttttccaggacgaggtggcaaaagcaaaacagctgcaggaggagcagcagcggcagcagcagcagatggagcaggaaaagcaggagctggtggccagcatggaggaggcccggaggcggcagcgtgaggcagaggagggtgtgaggcgcaagcaagaggaactgcagcgtctggagcagcagcggcagcagcaggagaaactactggcagaggagaaccagaggctgcgggagcggctgcagcgcctggaggaagagcaccgagctgcgttggcgcactctgaggagatcgccacctcccaggctgctgccacaaaagcactgcccaatggccgcgacgcacttgatggcccctccatggaggccgagcccgagtacacctttgagggattacgtcagaaggtgccagctcagcagctacaggaagcaggcattctgagcatggaggaactgcagcgtttgacacagggtcacaccacggtggctgagctcacgcagcgggaagatgtgcgccactacctgaagggcggcagcagcatcgcaggattgctcctgaagcccaccaatgagaaactgagtgtctacacagccctacagcggcagctgctcagccctggaacagcccttatcttacttgaggcccaggcagcctcgggcttcctgctggaccctgtccggaaccggcggctgacggtcaatgaggctgtgaaggagggtgtggtgggtcccgagctgcaccacaagctgctgtcagctgagcgtgccgtcactggctacaaggacccttacacaggagaacagatctctctcttccaggccatgaagaaggacctcattgtcagggaccatggcatccgcctgctggaagcccagatcgccacaggtggcatcattgaccctgtacacagccaccgtgttcccgtggacgtggcctaccagcgtggctacttcgatgaggagatgaaccgtgtgctggctgacccaagcgatgacaccaagggcttctttgaccccaacactcacgagaacctcacgtacctgcagctgctggagcgctgtgtggaggaccccgagacaggcctgcgcctcctgccactcacagacaaggctgccaagggtggtgagctggtgtacactgacacggaggcccgtgacgtcttcgaaaaggccacagtgtctgcaccattcggcaagttccagggcaagaccgtgaccatctgggagatcatcaactcagagtacttcacagcggagcagcgacgggacctgctccggcagttccgcacgggccgcatcacggtggagaagatcatcaagattgtcatcacggtggtagaggaacacgagcggaagggccagctctgctttgagggcctccgtgcccttgtgcctgctgcagagctgctggacagtggagtcatcagtcatgaagtctaccagcagctgcagcggggtgagcgctctgtgcgggaagtggccgaggcagacgaggtgaggcaggccctgcggggtaccagtgtcattgccggtgtgtggctggaagaagcagggcagaagctgagcatctatgaggccctgaggagagatttgctgcagccagaggtggctgtggccttgctggaggcccaggctggcactgggcacatcattgaccctgccacgagtgccaggctgactgtggatgaggcagtgcgtgctggcctggtgggtcctgagatgcacgagaagctcttgtcagctgagaaggctgtaacaggctatagggatccctactcgggacagagcgtctcgctcttccaggctctgaagaagggtctcatcccccgagaacagggcctgcgcctgctggatgcccagttatccactggtggcattgtagaccccagcaaaagccaccgtgtgcccctggatgttgcctatgcccggggctacctggacaaagagactaacagggccctgacgtcacccagagacgatgccagagtctaccttgaccccagcacccgggagccagtcacctacagccagctccaacagcggtgccggtctgaccagctgactgggttgagcctactgcccctctcagagaaggccgtccgggcccggcaggaagaggtctactctgagctccaggcccgtgagacattggagaaggccaaggtggaggttcctgtgggcggctttaagggcagggcgctgacagtgtgggagctcataagctcggaatacttcactgaggagcagcggcaggagctgctacggcagttccgcacaggcaaggtcactgtagagaaggtcatcaagattcttatcaccattgtggaggaggtggagactcaacggcaggagagactgtccttcagtggcctccgtgcccctgtgccggccagtgagctcctggcctccaagatcctcagcagaactcagtttgagcagctcaaggatggcaagacatcagtcaaagatctgtcagaggtgggctctgtgcggacactgctgcaaggcagcggctgcctggctggcatctatctggaggactcgaaggagaaagtaaccatctatgaggccatgcgccggggcctcctcagagccagcacagccacactcctgctggaggcccaggcggccactggttttctagtggaccctgtgcggaaccaacgtctgtacgtccatgaagctgtcaaggctggagtggtgggcccggagctccatgagaagctgctgtcggctgagaaggcggtcactggttacaaagatccctactctggcagcaccatctcgctgttccaggccatgaagaagggcttggtcctcagggaccatgccatccgcctgctggaggcccagattgccacaggtggcatcattgaccctgtgcacagtcaccgccttcccgtagatgttgcctaccagcgtggctacttcgatgaggagatgaaccgtgtgctggctgacccaagtgatgacaccaagggcttcttcgaccccaacacccacgagaacctcacgtacctgcagctgctggagcgctgcgtggaggaccccgagacaggcctgcgcctcctgccactcagaggggcagagaagacagaggtggtagaaaccacacaggtgtatactgaggaggagactcggagggcgttcgaggagacgcagattgacatcccaggtggtggcagccacggtggctcctccatgtctctatgggaggtgatgcagtcagacatgatcccagaggaccagcgtgcccggctcatggccgactttcaggctggcagagtgaccaaggagcgcatgatcattatcatcatcgaaatcattgagaagacggagatcatccgccagcagaacctcgcctcctatgactacgtacgccgccgcctcaccgccgaagacctgtatgaggcccggatcatctcccttgagacctacaacctcttccgggaaggcaccaagagcctccgtgaggttctggagatggaatctgcctggcgctacctttacggcacaggatcggtggccggtgtctacctgcctggctctaggcagacgctaaccatctaccaggcccttaagaaggggctgctgagtgccgaggtggcccgcttgctgctggaagcacaggcagccacaggctttctgctggacccagtgaaaggcgagaggctgactgtggacgaggccgtgcggaagggtctggtaggccccgagctgcacgatcggctcctctctgccgagcgagctgtaactggctaccgagacccctacaccgaacagcccatctcactcttccaggccatgaagaaggagctgatccctgccgaggaggcactgaggctgctggatgctcagctagccacaggaggcattgtggacccccgcctgggtttccacctccccctggaggtggcttaccaacgaggctacctcaataaggacacgcatgaccagttgtcagagcccagtgaggtgcgcagctatgtggacccctccacggatgagcgtctcagctacacacagctgctcaagcgttgccgccgtgacgacaacagcggccagatgctgctgccgctctctgatgcccgcaagctgaccttccgcggcctgcgcaagcagatcaccgtggaggagctggtacgctctcaggtcatggatgaggccacagcactgcagctgcaagaaggcctgacctccattgaggaggtcactaagaacctgcagaagttccttgagggtaccagctgcattgctggagtctttgttgatgctaccaaggaacggctgtcggtgtaccaggccatgaagaagggcatcatccgtcccgggacagccttcgagctcctggaagcgcaggcagccaccggctacgtcattgaccctatcaaggggctcaagctgactgtggaagaggccgtgcgcatgggtatcgtgggccccgagttcaaggacaagctgctgtctgctgagcgtgccgtcactggctacaaggacccttactctgggaaactcatctctctcttccaggccatgaagaagggcctgatcctgaaggaccatggcatccgcctgctagaggctcagatcgccaccggtggcatcattgaccctgaggagagccaccgcctgcctgtggaagtggcctataagcgtggtctctttgatgaggagatgaacgagatcctgactgacccctcagatgacaccaagggcttcttcgacccaaacaccgaggagaacctcacatacctgcagctgatggagcgctgtatcactgacccccagactggcctgtgtctcctgccgctgaaggaaaagaagcgggagcggaagacgtcctccaagtcctcagtgcgcaagcgccgcgtggtgattgtggaccctgagacgggcaaggagatgtcagtgtatgaggcctaccgcaagggcctcatagaccaccagacatacctggagttgtcagagcaggagtgcgagtgggaagaaatcaccatctcttcctcggacggcgtcgtcaaatctatgatcatcgaccgccgctctggccgccagtatgacattggtgacgccatcaccaagaacctcattgaccgctcagcactggaccagtaccgcgctggcacactttctatcaccgagtttgccgacatgctctcaggcaacgctggtggcttccgctcccgctcctcctctgtgggctcatcttcctcctaccccatcagttctgctgtccctaggacccagctagcctcctggtctgatcctactgaggagactggcccagtggccggcatcctagacacagagactctggagaaggtgtccatcacagaggccatgcaccgcaacctggtagacaacatcactggccagcggttgctggaggcacaggcctgcaccgggggcatcattgaccccagcactggtgagcgcttcccggtcactgaggctgtcaacaagggcctggtggacaagatcatggtagaccgtatcaatctggcccagaaggccttctgtgggtttgaggacccacgcaccaagaccaagatgtcagctgcccaggccctgaagaagggctggctttactacgaggcaggccagcgtttcctcgaggtgcagtacctgacgggtggtctgattgagcctgacacacctggccgtgtgtctcttgatgaagccttgcaacgtggcactgtggatgcccgcacagcccagaagctgcgtgatgtcagtgcctactccaagtacctcacgtgccccaagaccaagctcaagatctcttacaaggacgctctggatcggagcatggtggaggagggcacagggctgaggctgctggaagccgcggcacagtccagcaagggctactacagcccgtacagtgtcagtggctctggctctactgctggttcacgcactggttcacgcaccggctccagggccggctcccgtcgtggcagctttgatgccactggctctggcttctccatgaccttttcttcttcctcctactcttcctcaggctatggccgccgctatgcctcagggccttcagcctctcttgggggccctgagtctgcagtggcctgatcccccagcctgtatcctgccttcccgctctgcatgtcgccaggctccccgtggaggcgctggggtcttttctttcttcttctttttttttttttttttaacatttaaaggtgtcttcctcccaagcggtgcctaaaatctaaccaaaaagaccagaataacacattaatatatatatatatatgcgatgtccagacagcctgtgtcttgggaaacagggctggcccaggcccagtgaccactccactctccttgggcctccctaatcctttctacctgccactcaccacagctaggtgccttggagaatccagagctgggcactcagcccactactcctgtctctcctgggaggattgccatctgggaaaggcccccagacctctaagccaaccccactggatgtctacctgctggtcctagctgctgaggggaactggggacggtcctgtgagcagacagctgttgagtctcttgaggcctctgccctgagccagctgcttctccccagtgtatacctgaatattcagtgggttttgctggcaaaggaaagatcccaggccaaccatctcttccagcctgcccagagaagccccttccccatgggaagataaggcctggtcctggccccagcctcccgcctggctcctgcagctgccattggagctgtgctttgtagctcactaccccatacttattcccttgagacctgagcctctgcttcagccttccagcctcaactccccttgtaagtgccttctgtgtccttgtacccaggccctaaagacccagacccagggcaagagatggacattctggctgggcggggctggagggttctgcagatctgagaattccttctccagaggcccagggtcttcaagcctgtggaacccctctgggtgctgctgcccaccccactcccagggagccctggccagcccagctgtgctaacataagtacttggccagtgacactctcccttccctggccttggtggctcctacccctgcctccaccctctgagtgagctttgcatgttccactaaccttgagctggtgacaggtggagatgccaggcagaacactaacctgaccatgggcgggggccctgcggtgtccgcccctcaataaaagcaattccaaccttaaaaaaaaaaaaaaaa

SEQ ID NO: 4232 - DNA, 471 bp, Rattus norvegicus
  Genbank Accession No. X59677
gctagtgacacgaccactcttgagatcaccaccactcctgatgtgaacaccactgctgatgtcaccaccactcctgatgtgaccaccattgctgatgtcaccaccactgctagtatcaccaccactcctgatgtgaccaccacccctgatgtgaccaccactgctgatgtcaccaccactgctggtatcaccaccactcctgatctgaccaccactacgctatttctacccatcctggcctccatggcacaagccatctgtcttcacccgctctacgtcatgctcccctgcaccctggctgcctccctggctttcatgctacctgtggccactccacccaacgccattgtattctcctttggaggcctcaaggtgtctgatatggcccgcgctggattcctgctcaatatcatcggagtgctggctatcacattatccatcaacagctggagtatccccatcttcaagctg

SEQ ID NO: 4233 - DNA, 631 bp, Rattus norvegicus
  Genbank Accession No. X60212
ctgttagcggccagaggtgacctgtgaagatggttcgctactcccttgacccagaaaaccccacgaaatcatgcaagtcaagaggctcaaaccttcgtgttcactttaagaacacccgggaaactgcccaggccatcaagggtatgcatatccgcaaagccaccaagtatctgaaggatgtcactttaaagaagcagtgtgtgccattccggcggtataacggtggagttggtaggtgcgcccaggccaaacagtggggctggacacagggacggtggccaaaaaagagtgctgaatttttgctgcacatgcttaaaaatgcagagagtaatgctgaacttaagggtttggatgtagactctctggtcattgaacacatccaggtgaacaaggctcctaagatgcgcagacggacctacagagctcacggccggattaacccatacatgagctccccctgccacatcgaaatgatcctcactgagaaggaacagattgttccaaagccagaagaggaggttgcacagaagaaaaagatatcccagaagaaattgaagaaacaaaagctcatggcacgggaataaattcagcataaataaatgcggataaagtaaaaaaaaaaaaaaaaaaa

SEQ ID NO: 4234 - DNA, 1632 bp, Rattus norvegicus
  Genbank Accession No. X61296
gaattaacattgatggagaaaccaagatattccatgacaaaaccaaatttacacaatatctttctacaaatccagcactacaaaggataataaatggtaaagcccaacataaggaggcaagctataccctagaggaagcaagaaactaatcgtcttggcaacaaaacaaagagaatgaaagcacacaaacataacctcacatccaaatatgaatataaagggagcaataatcactattccttaatatctctcaatatcaatggcctcaactccccaataaaaagacatagattaacaaactggatacgcaatgaggaccctgcattctgctgcctacaggaaacacacctcagagacaaagacagacattacctcagagtgaaaggctggaaaacaactttccaagcaaatggtcagaagaagcaagctggagtagccattctaatatcaaataaaatcaatttccaactaaaagtcatcaaaaaagataaggaaggacacttcatattcatcaaaggaaaaatccaccaagatgaactctcaatcctaaatatctatgccccaaatacaagggcacctacatacgtaaaagaaaccttactaaagctcaaaacacacattgcacctcacacaataatagtgggagacttcaacaccccactctcatcaatggacagatcatggaaacagaaattaaacagtgatgtcgacagactaagagaagtcatgagccaaatggacttaacggatatttatagaacattctatcctaaagcaaaaggatataccttcttctcagctcctcatggtactttctccaaaattgaccatataattggtcaaaaaacgggcctcaacaggtacagaaagatagagataatcccatgcatgctatcggaccaccacggcctaaaactggtcttcaataacaataagggaagaatgcccacatatacgtggaaattgaacaatgctctactcaatgataacctggtcaaggaagaaataaagaaagaaaataaaaagtttttagaatttaatgaaaatgaagatacaacatacccaaacttatgggacacaatgaaagctgtgctaagaggaaaactcatagcgctgagtgcctgcagaaagaaacaggaaagagcatatgtcagcagcttgacagcacacctaaaagctctagaacaaaaagaatcaaatacgcccaggaggagtagaaggcaggaaataatcaaactcagagctgaaatcaaccaagtagaaacaaaaaggaccatagaaagaatcaacagaaccaaaagttggttctttgagaaaatcaacaagatagataaacccttagccagactaacgagaggacacagagagtgcgtccaaattaacaaaatgagaaatgaaaagggagacataactacagattcagaggaaattcaaaaaatcatcagatcttactataaaaacctatattcaacaaaatctgaaaatcttcaggaaatggacaatttcctagacagataccaggtatcgaggttaaatcaggaacagataaaccagttaaacaaccccataactcctaaggaaatagcagcagtcactaaaggtctcccaaccaaaaagagcccaggtccagac

SEQ ID NO: 4235 - DNA, 498 bp, Rattus norvegicus
  Genbank Accession No. X61381
tgtgtgcgatcgcggtggatcgctaccatgaaccacacttctcaagccttcgtgaacgctgccactgggggacaacccccaaactacgaaagaatcaaggaagaatatgaggtgtctgaactgggggctccccacggatcggcttctgtcagaactaccgtgatcaacatgcccagagaggtctctgtgcctgaccatgtggtctggtccctgttcaatacgctcttcatgaacttctgctgcctgggcttcattgcctatgcctactctgtgaagtctagggatcggaagatggtgggtgatatgactggagcccaggcctacgcatccactgccaaatgcctgaacatcagctccctggtcctcagcatcctcatggtcattatcactattgttactgtcgtcatcattgctcttaatgctcctcgtctccagacttgatagaggattctggtttctgatcctgacgtgcttcacgctctgctggctgcccttttt

SEQ ID NO: 4236 - DNA, 860 bp, Rattus norvegicus
  Genbank Accession No. X61654
ggctgctgagccgcggtaggagagcatcaagaagcgtcggggagcgcaggcccagcagccatggcggtggaaggaggaatgaagtgtgtcaagtttttgctctacgttctcctactggccttttgcgcctgcgcagtgggattgattgccattggcgtagcagttcaggttgtcttgaagcaggccattacccacgagactactgctggctcgctgttgcctgtggtcatcattgcagtgggtgccttcctcttcctggtggcctttgtgggctgctgtggggcctgcaaagagaactactgtctcatgattacatttgccatcttcctgtctcttatcatgctcgtggaggtggcggtggccattgctggctatgtgtttagagaccaggtgaagtcagagtttagtaagagcttccagaagcagatgcagaattaccttacagacaacaaaacggccaccattttggacaaattgcagaaggaaaataaatgctgtggagcctctaactacacagactgggagcgcatccccggtatggccaaggacagggtccccgattcttgctgcatcaacatcactgtgggctgtggaaacgatttcaaggaatccaccatccatacccagggctgcgtggaaactatagcggcatggctgaggaagaacgtactgctggtggctggagcagccctgggcattgcttttgtggaggtcctgggcattatcttctcctgctgtctggtgaagagtatccggagtggctacgaagtaatgtagggtgggggcgtgtctgagctcgtctgtcttttcatggagtggactctccaggttttcaattaaacggattattttttcagacc

SEQ ID NO: 4237 - DNA, 843 bp, Rattus norvegicus
  Genbank Accession No. X62145
ctcttttggccttgcttgccggcagactcgccgccatgggccgtgtgatccgaggccagaggaaaggtgccggttctgtgtttcgtgcgcacgtgaagcaccgtaagggagccgcgcgtctgcgtgctgtggacttcgcggagcgacacggctacattaaaggcatcgtaaaggacatcattcatgaccctggccgcggcgctcccctcgcgaaagtagtctttcgtgatccctatcgattcaagaagcggacagagctgttcattgccgcagagggaatccacactggacagtttgtgtactgcggcaagaaggcccagctgaatattggcaatgttttgcccgtgggcaccatgcctgagggtactatcgtgtgttgtctggaggagaagcctggggacaggggcaagctggcacgagcctccgggaactatgctacagtcatctcccacaacccagagaccaagaagacccgagtgaagctgccttcagggtccaagaaggtcatttcctctgctaaccgagctgttgttggtgtcgtggctggcgggggcagaattgacaagcctatcttaaaggctggccgtgcctaccataagtacaaggcaaagaggaactgctggccacgtgtgcggggtgttgccatgaatcctgtggagcatccctttggcggtggtaaccaccagcacattggcaagccttccactatccgaagagatgccccagctgggcgcaaagtgggtctcattgctgctcgccggactggacggctacgtggaaccaaaactgtacaggagaaggagaactagagttcaggagctaataaagtatgtgctttggcta

SEQ ID NO: 4238 - DNA, 585 bp, Rattus norvegicus
  Genbank Accession No. X62146
tcttcctgttctccaccatggcgcaagatcagggtgaaaaggagaaccccatgcgggaacttcgtatccgcaagctctgcctcaatatctgcgtgggggagagtggagacagactgacccgagcagccaaggtgttggagcagctcacaggccagacccctgtgttttccaaagctagatacaccgtcaggtcctttggcatccggcgaaatgagaaaatcgctgttcactgcactgtccgtggagccaaggcagaggagattctggagaaaggcctgaaggtgcgagagtacgaattacggaagaataacttctcagataccggcaactttggctttgggattcaggaacacattgacctaggcatcaaatatgacccaagcattggcatctatggcctggatttctatgtggtgctgggtaggccaggtttcagcatcgcagacaagaagcgcagaacaggctgcattggggccaaacacagaatcagcaaagaggaggcaatgcgctggttccagcagaagtatgatggcatcatccttcctggcaaataaactttatccaaaggccaataaagttttctca

SEQ ID NO: 4239 - DNA, 1316 bp, Rattus norvegicus
  Genbank Accession No. X62166
cgagacatatcggcggcgtgtggcggcgagatgtctcacaggaaattctcagctcctaggcatgggtccttgggcttcttgcctcggaagcgcagcagccggcatcgtggaaaagtgaagagcttccctaaggatgacccttccaagcctgttcacctcacagccttcctagggtacaaggctggcatgacccacattgtccgggaagttgaccggccaggatctaaggtgaataagaaagaagttgtggaggctgtgaccattgtggaaaccccacccatggtggttgtgggtattgtgggatatgtagaaaccccacgaggcctccggaccttcaagactgtatttgctgagcacatcagcgatgagtgtaaaaggcgtttctataagaattggcacaaatctaagaagaaggcttttaccaagtactgtaagaaatggcaagatgacacaggcaagaagcagctggagaaggacttcaacagcatgaagaagtactgccaggtcatccgcataattgctcacactcagatgcgcctgcttcctctgcgccagaagaaggcacacttgatggagatccaggtgaatgggggcactgtagctgagaagctagactgggcccgagagaggctggagcagcaggtccctgtgaaccaggtgtttgggcaagatgagatgattgacgtcatcggcgtgacaaagggcaaaggctacaaaggggtgaccagtcgttggcatacaaagaagctgccccgaaagacccacagaggtctgcgcaaagttgcttgtattggagcttggcatcctgcccgtgtagccttctctgtggctcgagctgggcagaaaggctaccatcaccgaacagagatcaacaagaagatttacaagattggtcaaggctacctcatcaaggatggtaagctgatcaagaacaatgcatctactgactacgacctgtctgacaagagcatcaacccactgggtggctttgtccattatggtgaggtgaccaatgacttcatcatgctcaaaggctgtgtggtgggaaccaagaagcgagtgcttactctccggaagtccttgctggtccagaccaagcgtcgggctcttgagaagattgacctgaagttcattgacaccacctccaaattcggacatggtcgcttccagaccatggaggaaaagaaagcattcatgggaccgctcaagaaagatcgcattgccaaggaggaaggtgcctgatgccaggagtactttgtgcagctggtggggtctcatcaataaaatattttcaattaaaaaaaaaaaaaaaaaaa

SEQ ID NO: 4240 - DNA, 429 bp, Rattus norvegicus
  Genbank Accession No. X62327
atggccagcttcctgggggccttgctgttggttctgtgccttcggtcggagtgggtaaagagtcaacagaagactgatggccagcaggttaagcaaaactctccatcgctgattgttcaagagggagggacagctatactgaattgtgactatgataatgacatgtttgactattttgcttggtacaaaaaataccctgccaacagccccacattcctcatatctgtacgttcgaataaggataagaatgaagacggaagattcacagttttccttaacaaaagcggcaaacacttctcattgcacatcacagcctcccagcctgaggactcagcagtgttcctctgtgcagcaggtgcggggaatgcaggtgccaagctcacgtttggagggggaacaaggttgacggtcaaaccccatgtcacagac

SEQ ID NO: 4241 - DNA, 466 bp, Rattus norvegicus
  Genbank Accession No. X62482
tgtggctgcagtggtccacactactctctgagtttcgccatgccgcccaaagacgacaagaagaagaaggatgccggaaagtcggccaaaaaagacaaggacccagtaaataaatctggtggcaaggccaaaaagaagaagtggtccaaaggcaaagttcgggacaagctgaacaatctcgtcctgtttgacaaagctacttacgacaaactttgtaaggaagttcccaactataagcttattactccagctgtggtctccgagagactgaagattcgaggttccttggccagggcagcccttcaggagctacttagtaaaggacttatcaagctggtttcaaagcacagagcccaagtaatttacaccagaaacacaaagggtggagatgccccagctgctggtgaagatgcataaacagattgaatcagctgtacatttgggaaaataaaactttattgaatca

SEQ ID NO: 4242 - DNA, 893 bp, Rattus norvegicus
  Genbank Accession No. X62660
ccaataaggaaactctgaaccaggagtcatggaagtcaaacccaagctctactactttcaaggcaggggaaggatggagtcgatccgctggctgctggctacagctggagtggagtttgaagaagaatttcttgagacgagagaacaatatgagaagttgcaaaaggatggatgcctgctttttggccaagtcccattggtggaaatagacgggatgctactgacacagaccagagccatcctcagctacctggccgccaagtacaacttgtatgggaaggacctgaaggagagagtcaggattgacatgtatgccgatggcacccaggacctgatgatgatgattatcggggctccatttaaagcccctcaggaaaaagaagagagcctagctttagcagtgaagagggctaaaaaccgttacttcccagtgtttgaaaagattttaaaagaccatggagaggcatttcttgttggcaaccaactcagttgggcagacatacagctactagaagccattttgatggtggaagaagtcagtgctcctgtgttgtctgacttccctctgctgcaggcatttaagacaagaatcagcaacattcctacaattaagaagttcctgcaacctggaagtcagaggaagccacctccggatggccactatgttgacgtggtcaggaccgtcctgaagttctagtgacagcgtgctttaaagtggctactgcaagggtccaatcacagcagcagctacagagcattccagaggcaagatagagctctcaggagtaaaggtcttcaaagaacctgaaaaccactctgtccaacaatgacaaatgccaattaaatagagtgaaaaactgttaaaaaaaaaaaaaaaaaaaaaaaaaaaaaaa

SEQ ID NO: 4243 - DNA, 522 bp, Rattus norvegicus
  Genbank Accession No. X62671
tctttcttgactccatcttcgcggttgcagcagcggcgtccgcgggtaagtagccaacatgcagctctttgtccgcgcccaggaactacacaccctcgaggtgaccggccaggagacggtcgcccagatcaaagctcatgtggcctcactggaaggcattgcccccgaagatcaagtcgtgcttctggcaggctcgccgctggaggatgaggccaccctaggccagtgtggtgtagaggccctgaccactctggaggtagctggccgcatgctgggaggtaaagttcatggttctctggctcgtgctgggaaagtgagaggtcagactcccaaggtggccaaacaggaaaagaagaagaagaagactggtcgggccaagaggcgaatgcagtacaaccgacgctttgtcaatgttgtgcccacctttggcaagaagaagggccccaatgctaattcctaagtcctgttgtgatcctgccacactaataaagccactttgcccagaaaaaaaaaaaaaaaaaa

SEQ ID NO: 4244 - DNA, 1508 bp, Rattus norvegicus
  Genbank Accession No. X63594
cccaactgccagcagcctgcaccctgcacccgctcagctccgcacagccatgtttcagccagctgggcacggccaggactgggccatggagggcccgcgggacggcctcaagaaggagcggttggtggacgaccgccacgacagcggcttggactccatgaaggacgaggattacgagcagatggtgaaggagctgcgggagatccgcctgcagccgcaggaggcgcctctggctgccgagccctggaagcaacagctcacggaggacggagactcgttcctgcacttggcaatcatccatgaagagaagacactgaccatggaagtgattggtcaggtgaagggagacctggccttcctcaacttccagaacaacctgcagcagactccactccacttggctgtgatcaccaaccagccaggaattgctgaggcacttctgaaagctggctgtgatcctgagctccgagactttcgaggaaatacccctctccatcttgcctgtgagcagggctgcctggccagtgtagcagtcttgactcagacctgtacgccccagcatctccactccgtcctgcaggccaccaactacaacggccacacgtgtctacacttagcctctatccatggctacctgggcatcgtggagcacttggtgactttgggtgctgatgtcaacgctcaggagccctgtaatggccggacagccctccaccttgcagtggacctgcagaatcctgacctggtctcgctcctgttgaagtgtggggctgatgtcaacagagtaacctaccagggctactccccctaccagcttacgtggggccgcccaagtacccggatacagcagcagctgggccagctgaccctggaaaatcttcagacgctgcccgagagtgaggatgaggagagctatgacacggagtcagaattcacggaagatgagttgccctacgatgactgtgtgtttggaggccagcgtctgacgttataagaggaaagtggccaaaggaacgtggacttgtatatttgtacaaatagagttttatttttctaaaaaaaaaaaaaaaaaagaaaaagaaaaaaaataagaaaggatacttagcaccacagcacacagcgcctagccccgagcattctattgtggtgattcagctgttgttcttctcaaatttggggaaacagatcattgaaattcaaaggaaatgtctcctaaggttcatgtttgtgggattttttttttttttttgaggtgattttccagaatctgataaaaggaccacatttaatttatgtgcttttggttgaaccgccatagacgtagctgaccccagttgccctctacgtaagaaccaggtcgatagtggtatgtgcttaagcaccccagctgagatttgtaccactttcttgtaaatgttgtatatggatgtattttgttggtaattatttttggtacttctaagatgtatatttattaaacagatttttacagtatcaaaaaaaaaaaa

SEQ ID NO: 4245 - DNA, 2446 bp, Rattus norvegicus
  Genbank Accession No. X63854
cgtcgctgcgcacccagaagacccagtttgggaggaagcagatttcagaagctctcctgaggtgccgctccgcagccgcagaccccaccatggcgctgtcccacccgaggccctgggcctctctgctgctggtggacctggctttacttgggttgctacaaagctctctgggaactctgcttcccccggggctgccaggactatggctggagggcaccctgcgacttggagtgctgtggggactgctaaaagtgggagggctgctgagactcgtggggacctttctgcccttgctctgcctgactaaccccctgtttttctcgctgagagccctggtgggaagcaccatgagcacctcagtagtcagagtggcttctgcctcttggggctggctgcttgctgactatggagccgtggcgttgagccttgccgtgtgggctgtgctgagccccgctggagcacaggagaaggaaccaggccaggagaataacagagcactcatgatacggttgctgaggctgtccaagccggatctgcctttcctcatcgttgccttcatctttcttgcgatggctgtgtggtgggagatgttcatccctcattattcgggtcgtgtgattgacatcctgggaggtgattttgacccagacgcctttgcgagcgccatctttttcatgtgcttattctctgttgggagctccctctctgcaggctgccgaggaggctccttcctctttgccgagtccaggatcaacctgcgcatacgagagcagcttttctcatctttgttgcgccaagaccttgcattcttccaggagaccaagacaggggagctgaactcacggctgagctcggacacctccctgatgagccagtggctctctttaaatgccaatatcctgctgcggagcctggtgaaggtggtggggctgtactacttcatgctccaggtctccccgagacttaccttcctctccctgctggacctgcccctcacaatagcagccgagaaggtgtacaacccccgccatcaggctgtgctaaaggagatccaggatgcagtggcgaaggcagggcaggtggtgcgtgaggccgtaggaggcctgcagaccgtgagaagctttggggcggaggagcaggaagtcagacgctacaaggaggccctggagcgatgtcgacagctgtggtggcgccgagacctggaaaaaagcttgtatttagttatacagagggtaatggccttgggcatgcaggtgctgattctgaacgtcggtgtgcagcagatcctggctggggaggtcacccggggcggcctgctctccttcctgctgtatcaggaggaagtggggcaccatgtccagaacctggtatacatgtatggggatatgctgagcaacgtgggtgctgcggaaaaggttttttcctacttggaccgaaggccaaatctgccgaatcctgggaccctggcccctcccaggctggaggggcgcgtggaatttcaagatgtctccttctcgtaccccagtcgccccgagaagcctgtgctccagggcctgacgttcaccctgcatcctggaaaggtgacggctttggtgggacccaatgggtcagggaagagcaccgtggccgccctgctgcagaacctgtaccagcccaccgggggccagctgctgctggatggcgagcccctggtccagtacgatcatcactacctgcaccgccaggtggttctggtggggcaggagcctgtgctgttctccggttctgtcaaggacaatattgcctatggcctgagggactgtgaggacgctcaagtgatggctgctgcccaggcggcctgtgcagacgacttcataggggaaatgacgaatggaataaacacagaaatcggggagaaagggagccagttagctgtgggacagaaacaacgtctggccattgcccgggcccttgtgcggaacccgcgggtcctcatcctggatgaggctaccagtgccctggacgccgagtgcgagcaggcccttcagacctggagatcgcaggaggacaggacgatgctggtcattgctcaccggctgcacacggttcagaatgctgaccaagttctggtgctcaagcaggggcagctggtggagcacgaccagctcagggatgagcaggatgtctacgctcacttggtacagcagcggctggaggcgtgaggcctccagacactgagccctctcaggactgtggccaggatctgacccacagggactgtgctggaggctagcgtcaggataaagattgggaccctttggactttgtttattttggtgggcttggtgggtgagggccaggggatgggatggttgctgggtggggtgggtggtttaaacattatttttttctaaatataaaaataataaatatatatataatactttaaaaaaaaaaaaaaaaaaaa

SEQ ID NO: 4246 - DNA, 1543 bp, Rattus norvegicus
  Genbank Accession No. X64336
cgaaattgcagtttctccttggcccacccctgtgtcagcagctccaggatgtggcagttcagaatcttcctgctgttcgcgtccacctgggggatttctggcgtatcagcccatcccgacccagtgttctccagcagcgagggtgcccaccaggtgcttcgggtcagacgagccaacagcttcctggaggaggtgcgggcaggcagcctggagcgggagtgtatggaggagatctgtgacttcgaggaggcccaggagattttccagaatgtggaagacacactggccttttggatcaagtacttcgatggtgaccagtgctcaactccgcccttggaccaccaatgcgacagcccatgctgcggccatggcacatgcatcgacggcctgggcggcttcagctgcagctgcgataagggctgggagggcaggttctgtcagcaggagatgggcttccaggactgtcgggtgaaaaatggcggctgctaccactactgcctggaggagaccagagggcggcgctgccgttgcgccccgggctatgagctggcagatgaccacatgcactgcaggcccaccgtgaattttccgtgtgggaaactgtggaagcggactgacaagaaacgcaagaacttcaaacgggacatagacccagaagacgaagaactagaactaggtccaaggatagtcaatggaacactaacaaagcagggtgacagtccctggcaggcgatccttctggactccaagaagaagctagcctgtggaggggtgctcatccacacctcctgggtgctgacggcagcccactgtctggagagcagcaagaagcttaccgtgaggcttggtgagtatgatctgagacgcagggacccctgggagttggacctggacatcaaggaggtcctcgtccaccctaactacacccggagcaacagcgacaacgacatcgccctgctccgcctgtcccagccagccacactctctaaaaccatagtgcccatctgtctgccgaacagcggcctggcgcaggagctcagtcaggctggccaggagacggtggtgacaggctggggctatcaaagcgacaaagtcaaggatggcagaaggaaccgcacctttattctcaccttcatccgcatccctttggccgctcgaaatgactgcatgcaggtcatgaacaacgtggtctcggagaacatgctctgcgccggcatcattggagacacgagagacgcctgcgacggcgacagtgggggacctatggtggtcttctttcggggtacctggtttctggtgggcctggtgagctggggtgagggctgtgggcacctcaacaactatggcgtctacaccaaagtgggtagctacctcaaatggatccacagctacataggggaaagggatgtttccctgaagagcccgaagctgtagcatccctccctgctcatctctggggcccagaggtcactcttagaataaggctgggctagtgagtaccaagacaggggacattaaaggggcaagcaacacctgaaaaaaa

SEQ ID NO: 4247 - DNA, 381 bp, Rattus norvegicus
  Genbank Accession No. X65190
ccatggcctcatctgtccaacagtcgctcggtactgtctttgatttatggaactgactggggtcttacagtcctcagtgcccacgatgcatattaggcctggaggcccatgtgctctgtgtctgggcattgagtgtaccagatgtcttatctgggccatgcaggccctgtgggaggcctcctacatatatagggggccccaacacagaggatggcacttgagcctgctgtccatctggaaaacgttgcatgcttggcccgctgctctggactgcctctctgcctgttgtgagttccagccagccctgatagacccattccttttgtagagtatataaggtctgccccagtagctcctagtgactctgggcctggttggtgg

SEQ ID NO: 4248 - DNA, 534 bp, Rattus norvegicus
  Genbank Accession No. X65228
ccttttttcgccaagatggcgccgaaagcgaagaaggaagctcctgcccctcccaaagccgaagccaaagcgaaggccttgaaagctaagaaggcagtgctgaaaggtgtccacagtcacaaaaagaagaagatccgaacgtcacccactttccggcggcccaagaccctgcggctccggaggcagccaaaatatcctcgaaagagtgcacccaggagaaacaagcttgaccactatgctatcatcaaattcccactgaccaccgagtcagctatgaagaaaatagaggacaacaacacgcttgtgttcattgtggatgttaaggccaacaagcaccagatcaaacaggccgtgaaaaaactctatgatatagatgtggccaaagtcaatactctgatacggcctgacggagagaagaaggcatatgttcgcttggctcctgattatgatgctctagatgttgccaacaagattgggatcatctaaagtgagtccagatggttaattctaaatatatactttttttccaccata

SEQ ID NO: 4249 - DNA, 3392 bp, Rattus norvegicus
  Genbank Accession No. X66366
agaacataattcaatccggtcagcacctcctctttctgcattcacagcagactccaccgaatccacgcacacttccataagaaatccatttcctgctcccgccttccccgacgatatccacgcctgtttccgctcggccccctccttcccgctcgcctcgcgctccccgggcgccctcgttctcgcgctctccaaggcaagcgcgctcccggccggcgcgtccgggctccgcttctcccggctcctgtcagtgcggtgattgcgctgggaaacatggcgaccgagggaatgatcctcacaaaccacgaccatcaaatccgtgtcggagtcctcacagtgagtgatagctgcttcaggaatcttgcagaagaccgcagtgggataaatctaaaagatctcgtccaggatccttctttgttgggtgggactatatcagcatacaagatagtaccagatgaaatagaagaaatcaaggaaacactcatagactggtgtgatgagaaggaacttaatttgatattaacaactggcggaacagggtttgcaccacgagatgtcactccagaggccacaaaagaagtaatagaacgggaagcgccagggatggccctggcaatgctgatgggatcacttaatgttacacctctgggcatgctctctagaccagtgtgtggaataagagggaaaactctgataattaacctgcctggtagcaagaaaggatctcaggaatgctttcagttcatactgccagctctacctcatgccattgaccttttacgtgatgccattgtaaaagtaaaggaggtgcatgatgaacttgaagatttaccttccccaccacctcctctttctccacctcctacaactagcccacataagcagacagaagacaaaggagttcagtgtgaagaggaggaagaagaaaagaaagacagtggtgtagcttcgacagaagatagttcctcatcacatattactgcagcagctcttgctcgaaagattccagactccatcatttctcgtggcgttcaggtgctcccacgagacacagcctcccttagcactactccttcagagtcgccccgtgcccaggctacatctcgcctctctacagcttcttgtccaacaccaaaagtccagtccaggtgcagcagcaaggagaacattctaagagccagtcacagtgctgtagatatcaccaaggtggctagaagacatcgcatgtctccttttcctctgacgtctatggacaaagccttcattacagttctggagatgactccggtgcttggtacagaaatcatcaattaccgagatggaatggggcgagtccttgctcaagatgtgtatgcaaaagacaacctacccccattcccagcatcagtaaaagatggctatgctgttcgagctgctgatggtccaggagatcgtttcatcattggggaatcccaagctggtgaacagccaactcagacagtaatgcccggacaagtgatgcgggttacaacaggtgctccaatcccctgcggtgctgatgcagtagtgcaagttgaagatactgaactcatcagggaatcagatgatggtactgaagaacttgaagtgcgaattctggtgcaagctcggccaggccaagacatcagacccatcggccacgacattaaaagaggggagtgtgttttggcaaaaggaacccatatgggcccttcagaaattggtctccttgcaactgtaggtgtcacagaagttgaagttaataagtttccagtggttgccgttatgtcaacagggaatgagctactaaatcctgaagatgacctcttaccaggaaagattcgggacagcaatcgatcaacacttctagcaacaattcaggaacatggttacccaacaatcaacttgggaattgtaggagacaacccagatgacttactcaatgccttgaatgagggtatcagccgtgctgatgtcatcatcacgtcaggaggtgtatccatgggggaaaaggactatctcaagcaggtgctggacatcgatcttcatgctcagatccattttggcagggtttttatgaagccaggcttgccaacaacatttgcaactttggatattgatggtgtaagaaaaattatttttgcactaccagggaatcctgtatcagctgtggtcacctgcaacctctttgttgtacccgcactgagaaaaatgcagggtatcttggatcctcggccaaccatcatcaaagctaggttatcatgtgacgtaaagctggaccctcgcccagaataccaccggtgtatactgacttggcatcaccaagaaccactgccctgggcccagagtacaggtaatcagatgagcagccgtctgatgagcatgcgcagtgccaatggattgctgatgctacctccaaagacagagcagtatgtggaacttcacaaaggcgaggtggtggacgtcatggtcatcggacggctatgatggtgaccaacaggagaaagtttcgatgcatgtccacatatcattgactgtatcctgtcatatgcaacggcacagctagtttttctgatctggataaaagttgatctgtatagtcaacatcttgaactatatttcaaatgaatttaaataccttttaaagaaaaaacacacctaagaataaatctcaacagacaactctattctggttatatcaaagcaaaattttcctttcttgcaaattgctttgtgtgttcaatgctaggtctgatagcgatagctttagtagacagcggtaggtgcctgcagaacttgtgtttttctcatctttaaatacaactacttatgctcttaatcaaggctgtctgcttctttatactagtgtaggcaacacttggatttcccttcttagtatgcttcataactgctttacagagagcttttgcttgttctttctcatgtatctcgtgtttatgtgcaccatgccaaaagacgagtgactgcgcggaggccccgctctgcctcaagagccttccctgctgagcacccagggaagctctcaccctcgcagcctctggcacacacagtactagcaggcagtaactggataccttttatttgaacaaacaaacggggtggggggaaatgcttccttaagtgctgacagcctttttaaccaacacatttaaaattgtacagaacaaaaataaaatcaaagactgatcttgtacagatattagtgttaccagcattcatgtggaatcaagagcaaaaataaaataatgttaaacaactctgtaccataacattttctgtaatgataatgaaacttaatgaataaaaaaaaatccttgatcattatttaaaaaaaaaaaaaaaaaaaaaaaaaaaaaaaaaaaaaaaaaaaaaaa

SEQ ID NO: 4250 - DNA, 3227 bp, Rattus norvegicus
  Genbank Accession No. X68101
taagctgtcacgtggacatagtccactcatgaagaaagtttttgatgtctacctgtgtttcctccaaaagcatcagtcagaaatggctttaaaaaatgtcttcactgccttaaggtcattaatttataagttcccctcaacgttctacgaggggcgggcagacatgtgcgcatctctgtgctatgaggttctcaagtgctgtaactccaagctcagctccatccgcaccgaggcctcccagctgctctacttcctgatgaggaacaacttcgactacacagggaagaagtcttttgtccggacacacttacaggtcatcatctctctcagccagctgatcgcagacgtggttggcattggaggaaccagattccagcagtccttgtctatcatcaacaactgtgccaatagcgaccggctcattaagcacaccagcttctcctctgatgtgaaggatttgaccaagaggatccgcacagtcctgatggccacagcccagatgaaggaacatgagaacgacccagagatgctggtggacctgcagtacagcctggccaagtcctacgccagcacccctgagctcaggaagacatggctggacagcatggcaaggatccatgttaaaaatggggatctctcagaggcagcaatgtgctatgtccacgtgacagctttggtagcggaatatctcacacggaaagaagctgacctagcactccagcgggaaccacctgtcttcccctacagccatacctcctgccagaggaagagccggggaggcatgttcagacaggggtgcacagccttcagggtcatcacaccaaacattgatgaagaggcttccatgatggaagatgtcggcatgcaggatgtccatttcaatgaggatgtgctgatggagctgctggagcagtgcgcagatggactttggaaggcagagcggctacgagctggattgctgacatctataaactcatcatccccatctatgaaaagcggagggactttagagactacccacctgtatgacaccctgcaccgcccatacagcaaagtgacagaggtcatcactcgggccgcaggctcctgggacctacttccgggtggcctcttcggacagggattcttcgaagatgaagacgggaaggaatacatctacaaagagcccaaactcacgcctctgtcagagatttctcagagactccttaaactttactcggataaattcggttctgaaaatgtcaaaatgatacaggattctggcaaggtcaacccgaaggatctggattccaagtttgcttacatccaggtgacccatgtgaccccgttctttgatgaaaaggagttacaggagaggaaaacagagtttgaacgatgtcacaacatccggcgcttcatgttcgagatgcccttcacccagactgggaagaggcagggtggcgtggaggagcagtgtaagcgacggaccatcctgacagcaatacactgcttcccctatgtaaagaagcggatccctgtcatgtaccagcaccacactgacctgaaccccattgaggtggccatcgatgaaatgagcaagaaagtggccgagctccaccagctgtgttcctcagctgaagtggacatgatcaaactgcagctcaaactgcagggcagtgtgagcgtccaggtcaatgctggcccgctagcatacgcccgagccttcctcgatgacaccaacacaaagagataccctgacaataaggtgaagctgctgaaggaagttttcaggcaattcgtggaagcttgtggccaagccttggcagtgaacgaacgtctgattaaagaggaccagctggagtaccaggaagagatgaaagccaactacagggagatccggaaggagctctccgacatcatcgtgccgagaatttgccctggagaggacaagcgtgctaccaaattccctgcacatcttcaacgccatcagcgggacaccaacaagcacagtggttcaagggttgaccagttcatcctcagttgtgtgactttacctcatgaaccacacgtggggacatgctttgtcatgtgcaaactcaggacgactttcagagctaatcactggttttgccaagcacaggaagaagccatggggaatgggagagagaaagagccctggactgtgatatttaatagcagattttataggagttgggggaaggtgcacatatttttttaaatctcactggcaatgtttagttttcctcatgtcttaacaggtgtatgtggatactcttgggctgcagttcaattttattcttcttacagtatagtattaaaataaatggtctaaaggaaaagagggaaagtatgctgggacacctgtagcaggtgtgctgggacacctgtaccagctgtgctgggacacctgtaccagctgtgctgggacacctgtagcagatgcagcagcactgaacctgggaatggggactaagctggaaaaatcttgaaaatatttttctccctgtggcacattcaggttgagtacaagaactatttttgtgtctagttttgaagactgaaaggaattgactattgagattttttactagtgaatgcggagacttagagcctttatatccatgccttgtgttgacaacatgagcacttccgaagctgagtgtgatgtgagcctaagcctagtcagcagcatagaaccaaaggcctgcactagcgaacacacctatgctaaaacctaaaaccccatgtacatatgttctgttaatacggcctcctcgctgagtccacgtacttactacatttctacacttttaatacatcagtgtccgtgttaagtttattattcgtgacccatttgtgctgttctcggtatatgcaaatacattggacttcactgtttattcttgtacataagaagtgcaatatggagatgtatacagtctttgctatgttaggtttataaactgtttttaaaaagaaattcatccttttgccaaaatggtggagtatgtgattggtaaaccctaaaccctgtggtgagtggagggataatttaaagttttcaccatgttatattttcttttaagactttaatttagtaattttatatttgggaaaataaaggtttttaatttaactggaatcactgccctgctgtaattacatatcatgtaccccaactgtattaaaaataacactgctgattttctggtaaaaaacgaaaaaaa

SEQ ID NO: 4251 - DNA, 3037 bp, Rattus norvegicus
  Genbank Accession No. X68812
tgtctcaaaagggagtgagcgcgccggatctcccggcagctttcaggacccgggaagggatccatccacaaggctcagcccaggttggaacaattggaagtctcattgtacaacatgcttcgactaagtctcccacccaatgtttcaatgggatttcgtctggtaactctggtggctctcttgtttacccatgttgaccatataactgcagatacagaggcagaaacaggaggaaatgaaaccactgaatgtactggctcatattactgtaagaaaggggtgattctgcccatttgggaaccccaagacccatcttttggggataaaattgctagagcaactgtgtattttgtggccatggtctacatgttcctcggagtttctattattgccgaccggtttatgtcctctatagaagtcatcacctctcaagaaaaggagattaccataaagaaaccaaatggagagaccaccaagactacagtgcgtatctggaatgagactgtgtccaacctgaccttgatggccctgggatcttccgctcctgagattctcctgtctgtcattgaagtgtgtggccataacttcaccgcaggggaccttggtcccagcaccattgtgggaagcgccgccttcaacatgttcatcatcatcgcgctttgtgtttatgtggtcccagatggagagacgaggaagattaaacatctgcgtgtgttctttgtgacagcagcctggagcatctttgcctatacctggctttacataattttgtctgtcagctctcctggtgtcgtggaggtctgggaaggattactcactttcttcttctttcccatctgtgttgtgttcgcttgggttgcagacaggcggcttctcttttacaagtatgtctacaagcggtacagggctggcaagcagagggggatgatcattgaacatgaaggagacagaccagcttccaaaactgaaattgaaatggatgggaaagtagtcaactcccacgttgacaatttcttagatggcgctctggttttggaagtcgatgagagggaccaagatgacgaggaagccaggcgtgagatggcaaggattctgaaggaacttaagcagaagcatcccgacaaagagatcgaacaattaatagaattagccaactatcaagtcctaagtcagcagcaaaagagccgagcattttaccgaattcaagctactcgcctgatgactggagctggtaacattttgaagaggcatgcagctgaccaagcgaggaaggctgtcagcatgcatgaagtcaacatggatgtggttgaaaatgacccagtcagtaaggtcttctttgagcaagggacataccagtgtctagagaactgtggtactgtggccctcaccattattcgaagagggggtgacttgaccaacactgtgtttgttgacttcaggacggaagatggcacagccaatgctgggtctgattatgagttcacggaagggactgtgatcttcaaacctggggagacccagaaggaaatcagagttggcatcattgatgatgatatctttgaagaagatgaaaactttcttgtgcatcttagcaacgtcagggtctcttcagaagtctcggaagatggcatactagactccaatcacgtgtctgcgattgcttgtctcgggtcacccaacactgccaccataaccatttttgatgatgaccacgcgggcatctttacttttgaggaacccgtgactcacgtgagcgagagcattggcatcatggaggtgaaggtgctgagaacctctggagcgcgaggaaatgttatcattccctataaaaccattgaaggcacagcccgaggtggaggggaggactttgaggacacctgtggagagctggaattccagaatgatgaaatagtcaaaacaatatcagtcaaggtaatcgatgacgaggagtatgagaaaaacaagaccttcttcattgagattggagaaccccgtctggtggagatgagtgagaagaaaggtggcttcacattaacagaggagtacgatgacaagcagccactgaccagcaaagaggaggaggagaggcgcattgcagaaatggggcgccccattctaggcgaacacaccaagctggaagtgatcattgaagagtcttacgaattcaagagcactgtggacaaactcattaagaagacgaacctggccctcgtggtggggaccaacagctggagagagcagttcattgaagcgatcaccgtcagcgctggggaagatgacgatgatgatgaatgtggggaggagaagctgccctcctgttttgattacgtgatgcactttctcacagtgttctggaaggttctgtttgccttcgtcccacctacagaatattggaatggctgggcctgcttcattgtctccatcctcatgatcggcctactgacagccttcattggagatctggcttcccactttggctgcaccattggtctgaaagattccgtgactgcagttgtgtttgtcgctcttggaacctcagtgccagacacatttgccagcaaagtagcagctacccaggaccagtatgcagatgcgtccataggcaatgtcaccggaagcaacgctgtgaatgtcttcctgggaatcggcgtggcctggtccattgctgccatctaccatgcggccaacggggaacagttcaaagtgtcccctggcacgctagctttctctgtcactctcttcaccatttttgctttcatcaacgtgggggtgctgctgtatcggcggaggccagaaataggaggtgagctgggtgggccccggactgccaagctcctcacatcttccctgtttgtgctcctgtggctcttgtacattttcttctcctccctggaggcctactgccacataaaaggcttctaaaggaacaatcaagatataataaatttatatatatatgtatacatatatatatacataaaaattatgtataatgaacagaggaaactgacatttgtcatgttcacttaacctcgtg

SEQ ID NO: 4252 - DNA, 1565 bp, Rattus norvegicus
  Genbank Accession No. X69834
cttttctcctgatggctgggatctgccctgctgtccttggcttcccagatggcacactgggaaatgacactctactccataaagatcaagacaaggggacacaactggacagtctcacattggagtccatcaacactgactttgccttcagcctttacaagatgctggctttgaagaatccagataaaaatgttgtcttctccccacttagcatctcagctgccttggccattgtgtccctgggagcaaagggcaacaccctggaagagattctagaagttctcaggttcaatctcacagagagctatgagacagacatccaccagggctttgggcacctcctccagaggctgagtcagccaggggaccaggtaaagatcatcacaggcaatgctctgtttattgataagaaccttcaggtcctggcagagttccaggagaagacaagggctctgtaccaggttgaggccttcacagctagcttccagcagcctcgtgtgaccgaaaagctcatcaatgacagtgtgagaaatcagacccaggggaagatccaggaactggtctcaggcctgaaagagaggacatccatggtgctggtgaacatcctcctctttagaggcaaatggaaggtgccctttgaccctgattacacatttgagtctgagttctacgtggatgagaagaggtctgtgaaggtgtccatgatgaaaattgaggaactgactacaccttacttccgggatgaggagctgtcctgctctgtgctggaactgaagtacacaggaaattccagtgccctgttcatcctccctgataagggcaggatgcagcaagtggaagccagcttgcaaccagagaccctgaagaagtggaaggactctctgaggcccaggaagatagatgagctctacctgcccaggttatccatttccactgactatagcctggaggaggtccttccagagctgggcattagggatgtcttctcccaacaggctgatctgagtaggatcacaggggccaaggacctgagtgtctctcaggtggtccacaaggttgtgctggatgtgaatgagacaggcacagaagcagctgctgccacaggagccaatttggtcccacgtagtggaaggccacctatgattgtgtggttcaacaggccattcctgatagctgtctctcacacacatggtcagcatatcctctttatggccaaagtcattaaccccgtgggagcctaaagctcccaatatctaatagttctacccaggtccatgagaccgagcctgcatgtggatctctgtgtataacccaaccttcaaactctgattggctgttgcaaagttggcttagacagtgacatcgactatctctgtggctcccagacattcaggagcgtttggactgtaatgtcaggttctcaggcccttgggagcatctgcacatgtttctgaacctggaatctgtcttttttcttcttcccttgtgactcctctttctgtgttcataccccaaacctagccactgtcaagtacacccagtcccaataaaggctttgagcaccg

SEQ ID NO: 4253 - DNA, 852 bp, Rattus norvegicus
  Genbank Accession No. X70223
aattcggcacgagcgcgatggcacctgccgcgtcaaggctgagggtggaatccgagctccggtcgcttcccaagcgagcgctcgcccaatacttgctgtttctaaagttctatccggtggtcaccaaagctgtcagcagtggcattttgtcagcccttggaaaccttctggcccagatgattgagaagaagcagaaaaaagactctcgaagtctagaagtcagtgggcttctcagatatttagtttatgggttgtttgtcacaggtcccctgagtcactacctctacctcttcatggagtactgggtccctcctgaggttccctgggccagagtcaagaggctcctgctggatcgcctgttctttgccccaacctttctgctgctgttcttcttcgtcatgaacttgctggagggaaaaaacatcagtgtctttgttgccaagatgaggagtggcttctggcctgctctgcaaatgaactggaggatgtggacacccttacagttcatcaacatcaactatgtgcccttgcagttccgggtgctctttgccaacatggcagctctgttctggtatgcctacctggcctctctggggaagtgatgtctgatacaccgtggatgaggtgtggggagatccaaccaccagcaggagagagcagaatccatcattaaggacacctcatgactaaattatgtgattcaagatgccttaaaattacagagggaggaacgtgtcagtgtcggaatcatgtgcttcaaagagacagcactagtctcggtggagttaatcttagttgtcactgcaaacaggtaaaggtcaataaacagtgatgcagcctcgtgccgaattc

SEQ ID NO: 4254 - DNA, 2217 bp, Rattus norvegicus
  Genbank Accession No. X70369
tgcccccggagagaaaggtgaaggaggccctcctggtgccgcaggaccccctggtggttctggacctgctggtcctcctgggcctcaaggtgtaaagggtgaacggggcagtcctggcggtcctggtgctgctggctttcccggtggccgtggtcttcctggtcctcccggcaacaatggtaatccagggcccccaggacccagtggtgctcctggcaaggatggccctccaggtcctgcaggtaacagtggttctcctggaaaccctggagtagctggaccaaaaggtgatgctggccaaccaggagagaaggggccacctggtgctcagggtcctccaggatctccaggtccacttggaattgcagggctaactggagcacgaggtcttgctggaccaccaggcatgccaggtccacggggtagccctggacctcagggtatcaagggtgaaagtggaaagccaggagccagtggccataatggggaacgtggtcctcctggaccccaaggtcttcctggtcagcctggtacagctggtgagcccggaagggatggaaaccctggatcagatggtcagccaggtcgagacggatctcctggtggcaagggtgatcgtggtgaaaatggttctcctggtgccccaggcgctcctggtcatccaggaccacctggtcctgttggtccatctggaaaaaatggtgacagaggagaaacgggtcctgctggtccttctggtgctccaggtcctgctggagctcggggtgctcctggtccccaaggtccacgaggtgacaaaggtgaaactggtgaacgtggctctaatggcatcaaaggacatcgaggattccctggcaatccaggtcccccaggttctcccggtgctgctggacaccagggtgcagttggtagtccaggccctgcaggtcccagaggcccagttggtccacatggacctcctggaaaagatggatcaagtggacatccaggtcccattggaccaccagggcctcgaggtaacagaggtgaaagaggatctgagggctcgcccggtcaccctggacagccaggaccccctggaccccctggtgcccctggtccctgctgtggtggcggtgctgccattgctggagttggaggtgaaaagtctggcggcttttcaccatattacggggatgatccaatggatttcaagatcaacactgaggagatcatgtcttcactcaagtctgttaacggacaaatagagagtcttatcagccctgatggttctagaaaaaaccctgctcggaattgcagagacctgaaattctgccaccctgaactcaagagtggagaatactgggttgatcctaaccaaggctgcaagatggatgctataaaagtgttctgtaatatggaaaccggagaaacatgcataaatgccagtcccatgactgtcccgcggaagcactggtggacagatgctggtgctgagaagaaacatgtttggtttggagaatctatgaatggtggctttcagttcagctatggcaatcctgatcttcctgaagatgtccttgatgtacagctggccttcctcagacttctttccagccgggcctcccagaacattacataccactgcaaaaacagcattgcctacatggatcaggccaatggcaatgtaaagaagtctctgaagctgatgggatccaatgagggagaattcaaggctgaaggaaatagcaaattcacttacacagttctagaggatggctgcactaaacacactggtgaatggagcaagacagtctttgaatatcaaacacgcaaggccatgagactccccatcatagatatcgcaccctatgacattggtggtcctgatcaagaatttggtgtggacattggccctgtttgctttttataagccaaactctctgaaaccccagcaaaacaaaaaccacatccatgtgttcctcttgctttaatctcgtcaaccagtgaaagtgaccaactaaattccagttatttatttccaaacttttggaaaaagcataatttgacaaaaatagaatacaatttttttgctgtttcacccaccaatacagttcaaatgcttttgttttatttttttaccaattccaacttcataatgtctcaatggtgctataataaataaacatcaacacttttatgataaaaaaaaaaaaaaaaaaaaaaaaaaaaaaaaaa

SEQ ID NO: 4255 - DNA, 1959 bp, Rattus norvegicus
  Genbank Accession No. X70706
ccacctataatttattccacctctggcaaaggactgcaaaggcagccaggaaggagattcatcttcacatggacgagatggcaaccactcagatttccaaagatgagcttgatgaactcaaagaggcctttgcaaaagttgatctcaacagcaatggattcatttgcgactatgaacttcatgagcttttcaaggaagcgaatatgccattgcccggatataaagtgagagaaattattcaaaaactcatgctggatggcgacagaaataaagatgggaagataagctttaatgaatttgtttatattttccaagaggtaaagagcagtgacattgctaaaaccttccgcaaagccatcaacaggaaagaagggatttgtgctctgggaggaacttcagagttgtccagtgaaggaacccagcattcctactcagaggaagaaaaatatgctttcgttaattggataaataaagctttggaaaatgatcccgattgcagacatgtcatacccatgaacccaaatactgatgacctattcaaagcagttggtgatggaattgtgctctgcaaaatgatcaacctttctgttcccgatacaattgatgagagagcaatcaataagaagaagcttacacccttcatcattcaggaaaacttgaacttggccctgaattctgcttctgccattggatgtcacgttgtgaacattggtgccgaagatctgcgtgccgggaaacctcatctggtcttgggactgctctggcagattattaagattggcttatttgctgacattgaattaagcaggaatgaagcactggcggctttgcttcgagatggtgagactctggaggagcttatgaaattgtctccagaagagcttctgctgagatgggccaacttccatctggaaaactcaggctggcaaaagatcaacaacttcagtgctgacatcaaggattccaaagcctatttccatctactcaatcaaattgcaccgaaaggacagaaggaaggggaaccacggatagatattaacatgtcaggtttcaacgaaacagatgatttaaagagagccgaaagtatgcttcagcaagcagataaattaggctgcagacagttcgttaccccggctgatgttgtgagcggaaaccccaaactgaacttggcctttgtagccaacctctttaataaatatccagcactaactaaacctgagaaccaggatattgattggactcttctagaaggagaaactcgtgaagaaagaacctttcgtaactggatgaactctcttggtgtgaatccccatgtcaaccatctctatgttgacctgcaggatgccctggtgatcttacagctgtatgagagaattaaagttcctgtggactggagtaaagttaacaagcctccatacccaaagctgggtgccaacatgaaaaagttagaaaactgcaactatgcagttgaattagggaagaatcaggctaaattctccttggttggcattggaggacaagacttgaatgatgggaacccaaccttgaccttggctgtagtctggcagctgatgagaagatatacccttaatgttatggaagatcttggagagggtcagaaagcaactgatgacatcattgtaaactgggtcaatggaacattgagtgaagctggaaagtcaacttctattcagagttttaaggacaagacgatcagctccagtttggcagttgtggatttaattgatgccatccagccaggctgcattaactatgaccttgtgaagactggaaatctaacagaagaagacaagcacaataacgccaagtatgcagtgtcgatggctagaagaataggagccagagtgtatgctctccctgaagaccttgtggaagtaaaaccgaagatggtcatgaccgtgtttgcctgtttgatgggcaggggaatgaagagtgtaa

SEQ ID NO: 4256 - DNA, 1739 bp, Rattus norvegicus
  Genbank Accession No. X70900
gcaggccccacgctgctggctgctgctgccacccttgcctcccgggctgcccgctgctgtggggacaccatgccccttcccaggcccggagactaaccccaaacctgcaccatctccggcgaaccccagggttccgccccagcccaacaggtcaacctgggaatcattaacaagagtccctgacatggcgaaggagggtggccggactgcaccatgctgttccagacccaaggtggcagctctcactgtggggaccctgctgttcctgacaggcattggggctgcgtcctgggccattgtgaccatcctactacggagtgaccaggagccactgtaccaagtgcagctcagtcccggggactctcgacttttggtgttggacaagacagagggaacgtggaggctgctgtgctcctcacgctccaacgccagggtagcagggctcggctgtgaggagatgggctttctcagggctctggcgcactcagagctggatgtgcgaaccgcgggcgccaacggcacatcgggcttcttctgcgtggacgagggcggtctgcctctggctcagcggttgctggatgtcatctctgtatgcgactgtcctagaggccgattcctgactgccacctgccaagactgtggccgcaggaagctgccggtggatcgcattgtggggggccaggacagcagcctgggaagatggccatggcaggtcagcctgcgttatgatgggacccacctctgtgggggatccctgctgtccggggactgggtactgaccgctgcacactgctttccagagaggaaccgggtcctgtctcggtggcgagtatttgctggtgctgtagcccggacctcacctcatgccgtgcagctgggggttcaggctgtgatctatcatgggggctaccttccctttcgagaccctactatcgacgaaaacagcaatgacattgccctggtccacctctctagctccctgcctctcacagaatacatccagccggtttgtctccctgctgcgggacaggccctggtggacggcaaggtctgtacagtgaccggctggggtaacacacagttctatggccagcaagctgtggtgctccaagaggcccgggtccccatcataagcaacgaagtttgcaacagccccgacttctacgggaatcagatcaaacccaagatgttctgtgctggctatcctgagggtggtattgatgcatgccagggtgacagcggaggccactttgtatgtgaggacagaatctctggaacatcaagatggcggctctgcggcattgtaagctggggtacgggctgtgctttggcccggaagccgggagtgtacaccaaagtcattgacttccgggagtggatcttccaggccataaagactcactccgaagctaccggcatggtaactcagccctgaccccgcctcatcgcctgctccgcgctgctccagcatccagagtcagagttggtctggtggctccagccgcacgtggcaggctccacactgggcctcacatggaacggttttctgctcggatccagtccatagatccaaggatgctgggtccaaggacctctcttccacagtggccggcccactcaatcccagggccattggcctcaccctcccaccccatgtaaatattactctgtcctctgggggctgctttcgaggcgccccttgtgcggatgctctttaaataataaaggtggttttgatt

SEQ ID NO: 4257 - DNA, 4447 bp, Rattus norvegicus
  Genbank Accession No. X72757
gatccacctgcctctgcttcctgagtgctggtattaaaggtgtgtgccaccaccatccagcaatacacctgttttttttttttaattgttcatatagttcagtatggccttgaactcatcaagcatgagtctgctgcctctacctccttttgttattttgagatagggtctcataccatagacaaggctaatcacagactctatatgtggtccagagtggcctctaattagagattccctcctcggtctctcagaactgtgccatatacacatacatttaaacttgggggtgtgtgggtggagacagggtttcactttacagcccaggcaagtctctaactcacaacaatcctcctgacccatctcactcttgctgggattatgagccacctgccaccatgcttcccgtgttgtgttgtttttgtttcatggagaagggtctcactatgcagcccctggacagcctggaactctcggtagaagaaagaggctatcctgggatcagtccatcgtcttcctccaagatgccaccacacctggcattccagcctttttaaaaaaaaaaacttttatctttaaaaaggcgtttagacaaaaagaaagaaaaaagaaagcagatatttaaaaagttctacagacgaaatttaacagatctttgtagaattcgagggagagagcaggaccattggccaatcgctgaggatatggagctgaaacaaagtccagattttctggcaccaattccagggttctttctgggtccaggagctattcattgactcattaattcatggattcataattcatatattcattaaattgcataaagcacctgctacttgatttcgggtaactctgggaatgcagcgctggcaaaatctaagcaccacggactttacagtccatatagggcgtcacagaagagaataacaacggtctttaagagtgatgacaagggtgtcgggtgccttggaaatcgcggaattagaagtcagcgaggaaaggagaatggcgcttccgataacgtcatttgttctcggcatttcagatcctgtccagggactccaaagaaggtagcagttaaaaacaaaacaaaaaaatatctcacagaagctctattcagcgaacatcctcacccagcagcagaggagggaggtggggcacaggtatgaaacgcatgcgcaatctcactcgtgccgccccgagggtttggaccaggaccgaaaatgtgcgcaggcgctacaattcctggccagtgagaaggcgttgcccaatgaaacttcgtttggcgtctctgtcccgcccccttcgggacccccatttccgcttccggcgcgccgggtagttccaagatggcgtcggcggtgctgagtgcgtctcgagtctctgggctgctgggccgggccctcccacgggtggggcggcccatgtcgagtggcgcccacggcgaggagggttcaggtaccggggctcgggtgggcgtgggggcctcagtggctggcacgcggcctggcggggccgtgaccttggcgggaggccttgcgggagggagcggccgaggctgacattctggtccccgctgcagctcgtatttggaaggccctcacctacttcgtggcgctgcccggggtgggagtgagcatgctcaacgttttcctgaagtcgcgacacgaagagcacgagagacccgagttcgtcgcctacccccatctccgcatcaggactaaggtacgcgctgcgcctctgctgtccttcaagcgtccgttatttctgggttgtccactccccagtcccagcccttggtgcgctaggatctcggctgcctgtctatccgcgcagactgaacattttatttactctcgttttacatgagggaagccagtttgtgggtcgcggcttaattttcttaaaaagccgcacaataaatggtcctggattttcaactcccccaatttgtcatcttttgtcttctggtgcacttcagatgctgtttcctgaatgaaagcttgtagttttggggtgtccttttatagaggcagatcctgaaggtgatttacaatccgggcgttaggcttgagcacagactgccggtttgtgtagacagttttaatgtctctcgatgaattttttttttttttggttctttttttccggagctggggatcgaacccagggccttgcacttcctaggcaagcgctctaccactgagctaaatccccaacccctctcgatgaatttttaacaaggctgtttatttgctccttaaattgtatcacctaattcacataggactagccttgcagaaacttaatctagatttttacatcccacgaggctcgatcccactcgtgtacagcctcagcacttgggaggccaaagcaggcatatctcctgagctcaagaccagtctggtctacatagtgagctccagggcagttatgggtgagaaaaaggtgcttcacagcatccttgccttggcctctgcccagtaggtggcagtagtaccccggcctaactgcctctagaaaatgcgcatgtctcgcccctgacacttgggggctgaaaataagagaatcagtagctcatggtcattctctgcttcgttatgaagtaggttatcttgggccaaagaggttatcacagatagccaaaaatggttgtgagctattggccaagagcagtgcttttcaaacatggtgggaaggaactggagagatggctcagtggtttagagtggtgctgctcatacggacagaagagccagttttaatttctagtgcccaggtgggtagctcacaacttgctttagctccatatgggggtgggactggtgtcttttggcttctgtggtacactcatacttttgtgcatatgcccacaaaggaggaggaggagtactaatgatcgtaataaaaaataaagccggcatggtagcacaggcctttaatctcagcacttgggaggcagaggcaggaggatcattgtaatttttaggtcagcctgtctatgtaggatttaaggttagctaaagaaaccctgcttcaataaaaaaaaaaaaaaaaaaaaaaaaaatcagggcttcaaagatgctcagcaggtgaaggagctagcaagcccaagacggtgcatcaatgtctgggacccactgcagaaggggagaacctatatacccacacacaagtggtctctgacagtggccgtatacatgcacactcaaaacaaaaggtactgaggaaaaggatagaatcttggttgcagttttctggtcctgcattaaaaagcatccacgtctgccatcgcccttctgatacaggaagggccacaccttgatggcacaatcctggctggagcagtttccaggggaagctaggaactgcttttcttatattaaaaatgttgattatggatagatacctatgtgtgtacatatgtacctgtgagtgcaggtgtctgtggggtcagaggtgtgagatcccggcagcagttgtgagacacctgatctgatgtctgagaattttggaggagcaagtctgatgaacggagccatctttccaacatcttatgttttttaaggtttaatttcttttaaattacgtgtgtgcatgtggatgcccaagggagccaaagagggcttcaggttccctggggctggagtagtagcagttatgagctgcctggtgtggatgctgggaaccaaacttgttctattcatgggcagagcagtacatggccttagctgctgagccatctccttccctggagcttgctttactactagccacttcagaggagagatggctcggtggttagagcaccggctgctcttccaggggtcctgagttcgatttccagcaaccacatggtggctcacaaccatctgtaatgggatctgaatccctcttttgtgtgggtgaagacatagtgtttatacataaataaattaaagtacataaaaaatttaacaagaaaaactatgggacagttgaaattatgccagtaaaggacaaatttccgtttggattttgttttatctgtttcaagcagttggcaggcaagttgtttgtgagcgttttcgggaaacatctaattgccatcttcactccacagcccttcccctggggagatggtaaccataccctcttccacaatcctcacatgaacccgcttccgactggctatgaagatgagtaaagagaacctggctcttcgcccaggcgacaagggaccacagcactgatttggaccctgactcttgtgtgtggaccacgaaagcccattggatgctcagctcatctttcctttatcagatggtgaccattactttgctcctccatccctttgctcgtaagaggagatggcttaaataaataacttgaactgagattgtccgtgggctggatgctgcatttttattctcagattaattgctttgctgcttgtagatct

SEQ ID NO: 4258 - DNA, 1448 bp, Rattus norvegicus
  Genbank Accession No. X73371
cctctagatgcatgctcgagcggccgccagtgtggtggaattctgccaaactcggagagaagcctgtgcctgcagctgactcactccaggactgatgggaaccctgctgttcctaccgctccccatggacagcaacaggactgtcgtccatgtgctctcacggactttgtaccatatgctactgtggacagctgtgctaaatcttgttgctgagtctcatgcaggtcttccgaaggctgtggtgaaacttgagcccccatggatccaggtgcttaaggaagacactgtgacactgatgtgcgaagggacccacaacaccaagaactgttctactcagtggtttcacaatgggagctccatctggcatcaagcccaagccaactacacgtttaaggccacagtcaatgatagtggagaataccggtgccgaatggaggagaccggcatcagcgaacccatacatctgggagtgatttctgactggctgctactccagacctctcaactggtgtttgaagaaggggaaaccatcacattaaggtgccatagctggaagaacaaacagctgactaaggtcttgttgttccagaatggaaaacctgtgaggtattatcatcaaagcagcaatttttcaatccccaaagccaaccacagtcacagtgggaactactattgcaaagcatatctaggaaggacaatgcacgtgtccaagcctgtcaccatcactgtccaagagcccaaatccagcagttcgttgccggtattgacgattgtagctgctgtcgctggaattgctgtagctgccattgttattatcctggtatccttggtctatctcaagaaaaagcaggttccagacactccttctggtctcgaagaagctgagaaaaatgaggtggagaatacaatcacctattcacttctcaagcatcctgaagctccggatgaagaatcagatcacgactaccagaaccacatttagtctctcttgagattgggaaaagcaaaccagtaaggccaggacctagcgtctcctggtccaaggaatgctgtagatatgaaagaaaacatctagagtcccttctgtgagtcctgaaaccaacagacactacgatattggttcccaatggttgactgtactaatgacttccataacttacagcttcccaactaaagactcttttgctatagatccacacagccaataaaattaatcaacttactgttgttaagagactacagcaacgtgggaactgcttatattacatgctaaggagaacaagtaacattaggatgcataatctcagcgaggatcaactagacgtgtaccaacctgtcaaaagtgatgcttctttataagaaactttatttccttatttttctataaaggtcacatattacttttatagtaaaatgttgtgaaaatgtccaaaaaaaaaaaaaaaaaa

SEQ ID NO: 4259 - DNA, 2093 bp, Rattus norvegicus
  Genbank Accession No. X74549
ctctggtctcatctctgccacgccactgctcagaggcacagagtgagcaacagtttggtagcgctgagtccatccactggaaattctcctcctgtctcagcggctttagctctgcagaaatgaagcatccagcctacactctccttctctctctcatcatgtctatgtgtgctgggagcaaaggccttgctgagcagctaactaaggaaaacctgaccgtgtccctcctgcctcctaacttccacaaagagaacacagtcaccaatgactggattccagaaggagaggaagatgacgactacctggacctggagaagctgctcagtgaagatgacgactacatctatgttgtcgatgcagtttccccaacagactcagaatcaagtgctggcaacatcctgcagcttttccaaggcaaaagccggatccagcgccttaacatcctcaatgcaaagtttgccttcaacctttaccgagtcctgaaggaccaggctacctcttctgataacattttcatagcacccgttggcatttccactgccatggggatgatctccttaggtttgaggggagagacccatgaggaagtacactcagttctacacttcaaagactttgtcaatgctagcagcaagtacgaggtgacaaccattcacaacctctttcgaaagctgacccatcgcctattcagaaggaattttgggtacacacttcagtcagttaatgacctttatattcagaagcagtttcccatacgggaggacttcaaagctgccatgagagagttttactttgctgaggcccaggaggctgacttctcagatcctgccttcatatcaaaggcaaacagccacattctgaagctcaccaagggcctcataaaagaagctttggagaatacagactctgctactcagatgatgattctgaactgcatctacttcaaaggagcttggatgaataaattcccagtagaaatgacgcataaccacaacttccggctgaatgagagagaagtagtaaaagtctccatgatgcaaactaaagggaacttccttgcggcaaatgaccaggagctagactgtgacattctgcagctggagtatgtagggggcatcagcatgctaattgtaattccacggaagctgtcgggaatgaagactcttgaagcacagcttacaccccaggtagtggagagatggcaaaaaagcatgacaaacagaacccgagaggtacttctgcccaagtttaagcttgagaagaattacaacctggtggaggtcctcaagtccatgggaatcacaaagctcttcaacaagaatggcaatatgtcaggcatctcagaccagaggatcatcattgatctgttcaagcaccagagtaccatcacagtgaatgaagagggtacccaagctgcagctgtaactacagtggggtttatgccgctgtctacccaagtcagattcactgttgaccgtcccttcctgttcctagtgtatgagcaccgaaccagctgtctgctgttcatgggaagagtggccaaccctgccaagtcttaatggtgctggtctgggcacctgatgtagtttggggacactctgtaatcctgttttcattctaagaggacagagatattttgatattgataatctatgtagtttgagataataatctaacagtaaacagtgtcataagtgcacagatgttaatgcaactaatggtcgtgccagctattccctagaggtcctagacacagactgcctcagcgccaacgcctctgtcactgagaatgggcagagtggagctgacactttctcctcagttagccgtaccagtcaaggtgtctcctcagccaggcccctccatatggatggtactgaggaactctcacccttccagggaggatgtccaaggagcaccattcttgcctagtggaaaagaaacctcaacatgtctgagacatttggacttaattcaaggctgaaccttttaaattcatgtaaatatcatctgttctgctttgtgtcaatagggctaccatagcctattctagagacaaataaacaaccatatttactaagcaaaaaaaaaaa

SEQ ID NO: 4260 - DNA, 2277 bp, Rattus norvegicus
  Genbank Accession No. X74593
ccaccagcgacagaatttactattggaagcagtttgagaaagctcaggtgttggccatggtcttctccagcagagtcttttttttttcacgtgtccccttactccagacccttggcggtttgacgagcagaaacaccagctccccgccggatccagccgacacctcaaagcaagagagcgacatggcagctcctgctaagggcgagaacctgtccctggtggtgcacggacctggagacattcgcctggagaactacccaatccctgagctgggcccaaatgatgtgttactaaagatgcattcggtggggatctgtggctcggatgttcactactgggagcatggccgaattggggacttcgttgtgaaaaagccaatggtgcttgggcatgaagctgctggaacagtcacaaaagtgggaccgatggtgaaacatctaaaaccaggagatcgggtggccatcgagcctggcgttccccgagaaatagatgaattctgcaagatcggccgatacaatctgacgccatccatcttcttctgtgccacgcccccagatgatgggaacctctgccgcttctacaagcacagcgctgacttctgctacaagcttcctgatagtgtcacctttgaagaaggggccctgattgagcctctctctgtggggatctatgcctgccgtcgaggttcggtttccctggggaacaaggtccttgtgtgtggagctgggccaattgggatagtcactttgcttgtggccaaagcaatgggagcttctcaagtagtggtgattgacctctctgcttctcggttagccaaggccaaggaagttggagcagactttaccatccaggttgccaaagagacccctcacgacattgccaagaaggtggaaagtgtgctggggagcaagccagaggtcaccatcgaatgcacgggagcggagtcctctgtccagacgggcatctatgccactcactctggcgggaccttggtggttgtgggaatgggccccgagatgatcaatttacccctagtgcacgcagctgtgcgggaggtggacatcaaaggcgtgtttcgatactgcaacacgtggccgatggcagtttccatgcttgcatcgaagactttgaatgtaaagcccttagtgacccataggttccccctggagaaggctgtagaagcctttgaaacagccaaaaagggactggggctgaaagttatgatcaagtgtgaccccaatgaccagaacccctaaatgtgattgctctatgcccttagcccactctctcagcatctaagggctaaatggaccagaaggggaagccattaatgcagaaccttctttttgaatggtaggaataataaactcataagccgagagccttagaggagctggcgtgccttaaagacagaagtaggggcaccttgggggacctcgtagccagaatgagatgcgtatactgagtaaagtctagaaccaagagtctggcagagaggtcccggaaatgccctttctcagtaccttctttgggtgaggagacgaagcatccttcgtccatgttccaatgtgggtgccagagagtggggctaacatggagaaatgacgtcattaacatgggagtggccccagagctgttcagagcacagtgtttcccaagtgtcatttgatttgaggggaataagggcactcagctctgcctcagctcagaattctgtccttacatttgcaaagtggaggccttcttcccaacagtgctcattcatgttcaggagcagtatcgttgctaagcaaccaggagtcttccacccaaagatcctaaatccagcctaactcatacaagagggccacaggagggcttgagtttcccactcacaggattcgcctcctctcccaggctcactcctaggcaattattatcccatcccactcagaagatgctccccttctcggctgttaaggctagtgatatctgatggatgggtatcacagagcctaattaaattatggggcttttctttataagatctgggtccaaatcatgccctttgtgatcttaagataatcaagaagagcacagtaactgtggtgtaacttgggctgcagtctgtaatccacctcttcagctatgagtaggggacacgtgaaaaaaaaaagactctgctggagaagaccatggccaacacctgagctttctcaaactgcttccaatagtaaattctgtcgctggtgttgaaaaaaaaaaaaaaaaaaaaaaaaaaaaaaaaaaaaaaaaaag

SEQ ID NO: 4261 - DNA, 966 bp, Rattus norvegicus; identical to SEQ ID NO: 3264
  Genbank Accession No. X76453
  misc_feature (1)..(966): n = a or c or g or t

SEQ ID NO: 4262 - DNA, 3551 bp, Rattus norvegicus
  Genbank Accession No. X76456
gtgtcctctgtctctgtctctgtctctgtctctgtctctgtctctgtctctgtctctgtctctgtctctgtctctctctctctctctctctgtgtgtgtgtgtgtgtgtgtgtgtgtgtgccttagagtctcttagactggctggcctgagagtcacagggaactacctagctacacttctcagtactgggatgagaggtgtgcattagaatgcctgcgttttacacgagctctggagactaaactcaaatcttcctacttgccaggcaagcagttaatgtcattatactgcatttccattttgatgtgttagctagtcatttctcttttaacatttggagtattttataactttggaggtagggctattcttaccctgtgaactgcttttcctctctctctctctctctctctctctctctctctctctctctctctctctctctctctcaagtcaagagattcccccctccgcatcattttcccctagttaataattaccaagaaatttgcaccaagaccaaaaaaagcctatgtatttcagaaatagattaactaggttactttttaacaaagcttaggtcaaagaatactataaaacgttggttttgccccagtcgcattactctcttgaatgtggcctcttttttaaatttaaacatgagacacttaaaacttacaggttttatttttttcctgttgtctttgactgaatccctagccctacccacaaagcctcaggatgtaggtaagaaatttacttgtgtattaccagggacaactaagtgaaggaaattactttcctttagccttttaaaactttgattattccggtggttttatttttctctctcttctcttagtatatgtatactggtcagtagtttcaaaggacccactacagattttcatattatctattctgtaggatgcttgcctttagaaacggccaacaatctggatcatgttgacttgagatgtaatttggacttcaaaaatattagaattttgtgacagatatagatatataaatatatgtatagtccaacagaagagcatagatacagtatatacatattcatacatatacatacatacacacatatgtacacactcacacacaaacacatgtataaacatttatatacaatctttaaaaaatattttttaaatatttttggttgtccaatatgtcttccagctagatgataaataccgtcaggtatatgagatcctgctttctccttcagctggcgttacacacctgcaacatactacgccaagagcaaggcgtgtcaaccgggtggaaaaggcaatttttacattttaccaaatgaggaaactttgaaattttctttgaaagaaaagaaaattttctttgaaaggtctttttaaatacctctggccagaaaggcacattttttttttacaggaatgtagtttccttaatatcatcccagagaacatatactcaagtgatattatacagactgataaggttgtatctatgtatcagagaatgtaaaaatttataatatatataacatcaatcaatcaattaatgaaaaagaggccatgcatttgaaagagagcaaggaggggttaacaggagaacaggcaggggatcatttcaatgctactcagaaattcataaatgagaacgttgcatacctgaccatcattgcatctgcccagtatgttcaggaagcatcctttgaggaggtggaaatgctggtgaaggtcatgctggattacaaggataggtgcttggctgacagcacacttccggagtgttcaaagatagctaatgatgctatccaggacatgctctgtgatatgaaggggctgccacagaagcataacttctcccattgctgtaggcaagccggctttcaaagaagactctgcttcttctacaacaagaaagctaatgtaggatttctgccccctttccctactctggatccagaagagaaatgccaagcttataaaaataacagtgaatcttttctcaacctctatatgtatgaggtggccagaaggaacccctttgccttcgccccagttcttctgaacgttgccgctaggtttgaggaggcggcgaccacgtgctgtgaacagcaacagaaagccacctactttcaagacaaggcagcccccatcacacagtatttaaaagcgttatcttcttatcaaagaaatgtttgtggagcccttttaaaatttggacccaagaccttaaactctataaacatcgccgtgtttagtaagaagttccccaagattggatttgaagaccttacgtccctcttagaagatgtttcttccatgtatgacgggtgctgtgaaggggacgtcgtgcagtgcatccggagccagagccaggttatgcaccatatttgttcaaaacaagactccatctcaagtaagatcaaagcgtgctgtgagaagaaactgccagagcgcgcagactgcataatcaacgcaaacaaggatgacagaccagaagacttatctctgagaacacccaaatttaccgacagtgaaaatgtgtgccaagagcgagattccgagcaggacaagttctttgctgagtttctttatgattactccagaagacatactgaactgtctacaccagagctcctaagaattactaaagtgtataaggatctcctggaagattgctgcaacagaaaaaacccgttaagctgttaccgccatgcggaggataagttcaacgagacaacagagcgaagccttgcgatggtccagcaagagtgcaaacagttccaggaattggggaaggacgctctacaacgccatttccttgtcaagttcaccaaggcagcccctcaactccccatggaagaactggtctcccttagtaaggaaatggtggcggctttggcaacctgctgcactctcagtgacgagttcgcctgtgtggacaacttggcagatttagttcttggagaattatgtggaatgaataagaatcgaactatcaatcccactgtggatcactgctgcagagctgactttgccttcaggagaccctgctttgagcacctgaaagccgacaccacctatgcactcccatcagtctctgcacttgtatctgctttgcgtgcagactggtgtcagcctctcaaggaggaccttcagaataagagacacaggtttctggtcaacttagtgaagtggatgccagagatcacagatgaggaacgtctgtgtttgttcacaaagttcacggctgctggggaggagtgtggcaacatacagaagcctgaggcctgtttcagtccagagagttcaaaaaccggtgatgtgagtcaagatgcagagaaacaaaggtgaacggaatgaccagagccagtaccagctcacaggatcgtcctgtggagaagttcagctcttaagaagactggaatagaaggtccttctgtaaccctttcttgaatcatgttcctacaaaaggcaataaaaagggaggataaagtttctcgcggcgcgaaaaaaaaaaaaaaaaaaaaaaaaaaaaaaaa

SEQ ID NO: 4263 - DNA, 1969 bp, Rattus norvegicus
  Genbank Accession No. X77934
agacgcttctgggtcgcgttagggagacgctctggtccggttgtgcgtgagaggaggagagcccagcgccacagcgacccggagagggatggcggccaccgggaccgcggccgctgcggccaccggcaagcttcttgtcctgctgctgctcgggctcacggcacccgcagcggctctggctggctatatcgaggctctcgcagccaatgctggaacaggctttgcggttgctgaacctcagattgcgatgttctgtgggaagctgaacatgcatgtgaacattcagactgggaagtgggagcctgacccaaccggcaccaagagctgcctgggaacaaaggaggaagttcttcagtactgccaggagatatatccagagctgcagatcacaaatgtgatggaagcaaaccagccagtcaatattgatagttggtgccgaagggacaaaaaacagtgcaggagtcacattgttataccattcaagtgtcttgtgggtgaatttgtaagtgatgttctgctagttccagaaaactgccagtttttccaccaagagcggatggaggtgtgtgagaagcatcagcggtggcacacagtcgtcaaggaggcatgtctgactgaggggatgaccttatatagctatggcatgctgctgccctgtggggtagaccagttccatggcactgagtatgtgtgctgccctcagacaaaggttgttgactctgactccactatgtccaaagaagaggaggaagaagaggaagaggatgaagaagaagactatgctcttgataaaagtgaatttcctaccgaagcagatctggaagacttcacagaagcagctgcagatgaggacgaggatgaggaggaggaggaggaggaggaaggggaggaagtggtagaagaccgtgattactactatgactcctttaaaggagatgattacaatgaggagaacccaactgaacccagcagcgatggcaccatctcagacaaggagattgctcacgatgttaaagctgtctgctcccaggaggccatgacggggccctgccgggccgtgatgcctcgttggtacttcgacctctccaagggaaagtgcgtacgctttatatatggcggctgcggcggcaacaggaacaattttgagtctgaggattattgtatggctgtgtgtaaaacgatgattcccccgactcccctgccaaccaatgatgtggacgtgtattttgagacgtcggctgatgacaatgagcacgcccgctttcagaaggctaaggagcagttggaaattcggcatcgcagccgaatggacagggtaaaaaaggagtgggaagaagcagaacttcaagccaagaacctccccaaggcagagcgacagaccctcattcagcatttccaagctatggttaaagccttagagaaggaagcagccagtgagaagcagcagcttgtggagacccatttggcccgagtagaagcaatgctgaatgaccgtcggcgcatagctctggaaaactacctggctgccctgcagtctgaccctcctcggccacatcgcattcttcaagctcttcgtcgttacgtccgtgctgagaacaaagatcgcctgcacaccattcgtcattaccaacatgtgttggctgttgacccagaaaaggctgcgcagatgaaatcccaggtgatgacacacctccatgtcattgaagaaagaaggaaccaaagtctctctctgctgtacaaagtgccttatgtggctcaagagattcaggaggaaattgatgagctccttcaggaacagcgagcagatatggaccagtttacctcctccatctcagagaaccctgtggatgtccgggtgagctctgaggaaagtgaggagatcccgccgttccaccctttccatcccttcccatccttgtctgagaacgaagacactcagccggagttgtaccacccaatgaaaaaagga

SEQ ID NO: 4264 - DNA, 1882 bp, Rattus norvegicus
  Genbank Accession No. X78855
gcaggcctggctaaactggtgagggccctacccagccatgcccaccgtggatgatgtcctggagcaagttggagagtttggctggttccagaaacaagccttcctgttgctatgcctgatctcagcttctttagctcccatctatgtgggcatcgtcttcctgggcttcacccctggacattattgccagaatcctggggtggctgagctgagccagcggtgtggctggagccaggcagaggagctgaactacactgtgccgggcctgggaccttcggacgaggcctccttcctcagccagtgcatgaggtatgaggtggactggaaccagagcacccttgactgtgtggacccactgtccagcctggttgccaacaggagtcagttgccattgggcccctgcgagcatggctgggtatacgacactcccggctcctccatcgtcactgagtttaacctggtgtgtggagacgcctggaaagtggacctttttcagtcctgtgtgaacttgggcttcttcctgggctccctggttgtgggttacattgcagacaggtttggccgtaagctctgtctcttggtgaccacgctggtcacatctgtgtccggtgtgctaacagcggtggccccagactatacatccatgttgctctttcgcctgctgcagggcatggtcagcaagggcagctgggtgtccggctataccttgatcacagagtttgtcggctctggctacaggagaacgacggccattttgtaccagatggccttcacagtggggctagtggggcttgccggggtggcctatgccattccagactggcgctggctccagctagctgtgtccctgcctaccttcctcttcctgctgtattactggtttgtcccagaatccccccggtggctgttgtcccagaagagaaccacgcgagctgtcaggataatggagcaaattgcacagaagaacgggaaggtgcctcctgctgacctgaagatgctctgccttgaggaggatgcctcagaaaagcgaagtccttcgtttgccgacctgttccgcactcccaacctgaggaagcacaccgtcatcctgatgtatctatggttctcttgtgctgtgctgtaccagggtctcatcatgcacgtgggagccacaggggccaacctctacctggacttcttttattcttctctggtggaattccccgcggccttcatcatcctggtcaccattgaccgcattggccgcatctacccaatagcggcctcgaatctggtgacgggggcagcctgcctcctcatgatctttatcccgcatgagctgcactggttgaacgttaccctcgcctgtcttggccgtatgggggccaccattgtgctgcagatggtctgcctggtgaacgctgagctgtaccctacattcatcaggaatcttgggatgatggtatgctctgccctgtgtgacctgggtgggatcttcacccccttcatggtgttcaggctgatggaagtttggcaagccctgcccctcattttgtttggggttttgggcctgactgctggggccatgactcttcttctcccagagaccaagggtgtggctttgcctgagactattgaagaagcagagaacctggggaggaggaaatcaaaggccaaagaaaacacgatttaccttcaggtccaaacaggcaagtcctcaagtacctgacagggatgctgtgccaggagctgagtggcagagagaaaggaggacttgccacttggaggattcccagaagcctttgcctttccagactcttgtatatatgcaccaggttccaaatgaactaccaaccttaaagacttttctgaaagcccaaaaaaaaaaaaaaaaaaaaaaaaa

SEQ ID NO: 4265 - DNA, 1838 bp, Rattus norvegicus
  Genbank Accession No. X78949
gaattccgcgggattccgccttcctcacggcccgctatccaggtgtgtgaacctgtggggtgctccaagatgatctggggtgtattaatgatggggattctacttcctcagtgttcagcccatccaggcttttttacttcaattggtcagatgactgacttgatccataatgagaaagacctggtgacgtcactaaaagattacattaaagcagaagaggacaagttagagcaaatcaaaaaatgggcagagaagttagaccggctaacaagtacagcaacaaaagatccagaagggtttgtcggacaccctgtaaatgcattcaagttaatgaaacgtctgaacaccgagtggagtgagttggagaatctgatcctcaaggatatgtcagatggcttcatctctaacctgaccattcagaggcagtacttccctaacgacgaagaccaggttggggctgcaaaagctttgtttcgtctgcaagacacctacaacctagacacgaataccatctcgaagggcaatcttccaggagtgaaacacaagtcttttctaacagctgaggactgctttgagttgggcaaagtggcctatacagaagcagattattaccacacagaactctggatggagcaggctctgatgcagctggaggagggagagatgtctactgtagacaaagtctcggttctagattatttgagctatgcagtgtaccagcagggtgacctggataaggcacttctgcttacaaagaaacttcttgaactagatcctgaacaccagagagccaatggtaacttagtatattttgagtatataatgagtaaagaaaaagatgccaataagtctgcttcgggtgagcgggctgatcagaaaactacaccaaagaaaaaggggattgctgtggactacctgccagagagacagaagtacgaaatgctgtgccgtggggagggtatcaaaatgactcctcggagacaaaaaaggctgttctgccgctaccatgatggaaaccggaatcctaaatttatcctggccccagccaagcaggaggatgagtgggacaagcctcgcatcattcgtttccatgacatcatctcagatgccgagattgagatcgtcaaagatttagcaaagcccaggctgagccgagctacagtacatgaccctgagactgggaaattgaccacagcacagtacagagtatctaagagtgcttggctgtctggctatgaagatcctgtggtgtctcgaattaatatgagaatacaagatctcacaggactggatgtttccacggcagaggaattacaggtagcaaattatggagttggaggacagtatgaaccccattttgactttgccaggaaagacgagccggatgcttttagagagcttgggacaggaaataggattgccacgtggctcttctacatgagtgatgtgtctgctggaggcgctactgtttttcctgaagtgggagccagtgtttggcccaaaaaaggcactgctgtcttctggtacaatctgtttgccagtggagaaggagattacagtacacggcacgcagcctgtcctgtgctagtgggaaacaaatgggtatccaacaaatggctccatgaacgtggacaggaatttcgaaggccgtgtaccctgtcagaattggaatgacaaccaggcttcccgtggctcctctcgtcctctaacgcaccaggcatgatcgctgactgtaacattcagaagtttacagctgactaacactccatgattaattcggccgtgaaccccatcccatgtttcatctgtggacaatcacttatttttgtgaatttttt

SEQ ID NO: 4266 - DNA, 1109 bp, Rattus norvegicus
  Genbank Accession No. X79208
atggagctgctcaagctgaaccgcagcgtgcagggaccaggacccgggtcggggtcttctttgtgccgcccgggtgtctcccttctcaacagcagtagtgccgggaacctcagctgtgacccccctcgtatccgcggaaccgggaccagagaattggagatggcgattagaatcaccctttatgcagtgatctttctgatgagtgttggcggaaacgtgctcatcatcgtggtcctgggactgagccgacgcctaagaacggtcaccaacgccttcctgctctccctggcagtcagcgacctcctgctggccgtggcttgcatgcccttcacactcctgcccaacctcatgggcacattcatcttcggcacagtcatctgcaaggccatttcctacctcatgggtccgtgctactgctactgcttttgttcttcatcccgggtgtggttattgcggtggcctatggactcatctcccgcgaactctacctaggactccactttgatggtgaaaatgacagcgagacccaaagccgggcccgaaaccaagggggcctgccgggtggggcagcaccagggcctgtccaccagaacgggggctgccggcctgtaaccagcgtagctggggaagacagtgatggctgctgtgtgcaacttccgcgttcccgactggagatgacaacgctaaccacacccactcctgggccagtccctggccctcggcccaaccaggccaagctgctggctaagaagcgggtggtgcgaatgctgctagtgattgttttgcttttcttcctgtgttggctgccagtgtacagcgtcaacacgtggcgcgccttcgatggcccaggcgcacaacgagcactctcaggggcccctatctctttcatccacttgctgagctacgtctctgcttgtgtcaaccccctggtctactgtttcatgcaccgccgcttccgccaggcctgcctggacacatgtgcccgctgttgcccacgccctccacgagctcgcccacagcctcttccagatgaggatcctcctaccccctccatcgcttcgctgtccaggctaagctataccaccatcagcacactggggcctggctga

SEQ ID NO: 4267 - DNA, 1374 bp, Rattus norvegicus
  Genbank Accession No. X80130
aggcctgccaccagcgccagcccagctgaacccagccgcccaaagcacgcctacagatcccacagaagctgtaccaggatgtgtgacgacgaggagaccacagctttggtgtgcgacaatggctccggactggtgaaggctggctttgcgggtgatgatgctcccagagctgtcttcccatccatcgtgggtcgcccacgccaccagggtgtcatggtaggtatggggcagaaagactcctatgtaggtgacgaggctcagagcaagcgaggcatcctgactctgaagtaccccatagagcacggcattatcaccaactgggacgacatggagaagatctggcaccacaccttctacaatgagctccgtgtggcccctgaggagcacccgaccctgctcactgaggccccactgaaccccaaggccaaccgtgagaagatgacacagatcatgtttgagaccttcaatgtgcctgccatgtatgtggccatccaggcggtgctgtccctgtacgcttctgggagaaccacaggcattgttctggattctggcgacggtgtgactcataacgtccccatctatgagggttatgccttaccccatgccatcatgcgtctggatctagctggtcgggacctcactgactaccttatgaagatcctcactgagcgcgggtactcctttgtcaccaccgctgaacgtgaaattgtccgagacatcaaagaaaaactgtgttatgtcgccctggattttgagaatgagatggccaccgctgcatcttcctcctctctggagaagagctacgaacttcccgatggccaggtcatcaccattggcaacgagcgtttccgctgtcctgagactctcttccagccctctttcattggtatggagtctgccggcattcacgaaactacttataacagcatcatgaagtgtgacatcgatatccgcaaagacctgtacgccaacaatgtcctgtctggaggcaccaccatgtaccctgggattgctgatcgtatgcaaaaggaaataactgcactggctcccagcaccatgaagattaagattattgctccccctgagcgtaaatactctgtctggattgggggctccatcctggcctctctgtctaccttccaacaaatgtggatcagcaagcaagagtacgatgaggccgggccctccattgtccaccgcaagtgcttctgaggcggctaccttacactcaggacgacagtattgtgcttggaatcctctgaggccctctcccatctcccatcagtcattgtacagtttgtttacacacgtgcagtttgtttgtgcttcaaatatttattgctttataaataaaccagaccaggacttgcaacc

SEQ ID NO: 4268 - DNA, 443 bp, Rattus norvegicus
  Genbank Accession No. X81448
caagatcatcgaagacctgagggctcagatctttgcgaattctgtggacaatgcccgcatcgtcttgcagatcgacaatgcccgtcttgccgctgatgactttagagtcaagtatgagacggaactggccatgcgccagtctgtggagagtgacattcatggactccgcaaggtggtggatgacaccaacatcacgaggttgcagctggagacagaaatcgaagcgctcaaggaggagctgctgttcatgaagaagaatcatgaggaggaagtccaaggcctggaagctcagattgccagttctgggttgactgtggaagtggatgctcccaaatctcaggacctcagcaagatcatggcggacatccgtgcccagtatgaacagctggctcagaagaaccgtgaggaactggacaagtactggtctcagcagattgaggaga

SEQ ID NO: 4269 - DNA, 1294 bp, Rattus norvegicus
  Genbank Accession No. X82445
ggaattcccggaaaccgttgggcccgagcgaaccgtaccgagcgcgggcatcgcagagcgcgagtgcggagctcggagcgcagcacgatgggaggggagcaggaggaggagcgcttcgacggcatgctgctggccatggcgcagcagcacgagggcggcgtgcaggagcttgtgaacaccttcttcagcttccttcgacgcaaaacagactttttcattggaggagaagaggggatggcagagaagctcatcacacagacttttaaccaccacaaccagctggcacagaaggccaggagagagaagcgagctcggcaggagacagagcgtcgggagaaggcagagcgggcagccaggctggccaaggaggccaaggcagagactcccgggccacagatcaaggaactgactgatgaggaggcagagagactgcagctggagattgaccagaaaaaggatgcagagaaccatgaggtgcagcttaagaacggcagtcttgactctccagggaagcaggatgctgaggaagaggaagacgaggaagacgagaaggacaaaggaaagctgaaacccaacctaggcaatggggctgacctgcccaactaccgctggacccagaccctgtcagagctggatctggcagtgcccttccgagtcagcttccggctgaagggaaaggatgtggtggtggacatccagcggcggcacctccgggtgggcctcaaaggacaggcaccagtgattgatggagagctctacaatgaagtaaaggtggaggagagctcgtggctcatcgaggatggcaaggtggtgacagtgcatctggagaagatcaataagatggagtggtggaaccgcttggttaccagtgaccccgaaatcaataccaagaagattaaccctgagaactccaagctctcagacctggacagtgagactcgcagcatggtggaaaaaatgatgtatgaccagaggcagaagtccatgggcttgcccacctctgatgagcagaagaaacaggaaatcctgaagaagttcatggatcagcacccagagatggatttctccaaggccaaattcaactagctcctgttcaccttcctgaactcttgcagttgagcccgtagccactcaacttcctttcctgagacccaggagccttagggctgggcaggcgtgggacttcccaggcatgtgagctccagggattcactggagaagggctgggtcttgggggtcttgtccttgctatttgtcctgttacacattaaaactatttactctgttccaaagg

SEQ ID NO: 4270 - DNA, 2783 bp, Rattus norvegicus
  Genbank Accession No. X83231
ctcagcaatggtgactctgtggtggccctgccttgtcttggctctgctctctggcttggagacctctggctttccaaggagtcccctccggctgcttgggaaacggagccttccagaaggggtggtggatggcattgagatctacagcaccaagatcagctgcaaggtgacctcccgctttgctcacaatgttgtcaccacaagggctgtcaaccgtgcagacaaggccaaggaagtttcctttgatgtggaactgcccaagacagccttcatcaccaacttcaccttgactattgatggtgtcacctaccctgggagtgtcaaggagaaggaagttgcgcagaaacaatatgaaaaggctgtgtcccagggcaagacagccggtttggtcaaggcctccgggaggaagctggagaagttcacagtgtctgtcaatgtggccgcaggcagcaaggtcatctttgagctgacctatgaagagctgctcaagagaaacaagggaaagtacgagatgtaccttaaggtccagcccaagcagctcgtcagacactttgagatcgacgcacacatttttgagccacagggcatcagcatgttggacgccgatgcctcatttatcactaatgacctcctgggaagtgccctcaccaagtccttctcagggaaaaaggggcatgtgtctttcaagcccagcttagaccagcagcgctcatgcccaacctgtacggactcccttctcaacggggacttcaccatcgtctatgatgtgaacagagagtctccaggaaatgtgcagatagtcaatggctacttcgtgcacttctttgcaccccaaggcctcccagtggtgcctaagaacatagcctttgtgattgacgtcagtggctccatgtctggtcggaaaatccagcagaccagggaagcccttctcaaaatcctggatgatatgaaggaagaggactatctgaatttcatcctcttcagcactggtgtgaccacctggaaagatcacctagtcaaggccacacctgcaaacctcgaggaggccagggcgtttgtgaagaacatccgtgatcgaagcatgaccaacatcaatgacgggctgctgaggggtattgaaatgctgaacaaggcccgagaagaccaccttgtcccggagaggagcacctccatcctcgtcatgttgacagatggggatgctaatactggcgagagcagacctgaaaagatccaggaaaacgtccggaacgccatcaggggcaagttccctttgtataacctgggttttggcaacaatctgaattataatttcctggagtctctggccctggagaaccacgggtttgcccggcgtatttatgaagattctgatgccagcttacagctgcagggcttctacgaggaagtagctaatcccttgttgactaatgtggagttagaataccctgagaatgccatcctggacctcaccagaaacagttacccccacttctatgatggctctgagattgttgtagcagggcgtctggtggacaggaacgtggacaacttcaaagcagatgtgaagggtcatggggccctgaatgacctgaccttcacagaggaggtagacatgaaggaaatggacgcggccctgaaggagcaaggctacatctttggggactacattgagcggctctgggcctacctcactattgagcagttactggagaaacgcaagaatgcccgtggggatgagaaggagaacatcacagcagaggccctggagctgtccctcaagtaccactttgtaactccactgacctccatggtggtgaccaagcctgaggacaacgaggaccaaacagccattgctgacaagcctggggaagaagccatctctgcgtccacggcctacctgaccagtcagcagtccagccatagcccctactattatgtggatggggacccccacttcatcatccaagtcccgggaaaaaatgacaccatctgcttcaacatcgatgagaagcctggcacggtgctgagccttattcaagacccagtcacaggcatcgcagtgaccgggcagatcattggagagaagggaaataatgcttcttccaggacagggaaaacttactttggcaaactgggcattgccaatgcttggatggactttcggattgaggtgaccacggagaagatcatcctggggaacggggatgcactgagcacgttcagttggctagacaccgtcacggtcacacagacagggctgtctgtgacaatcaacaggaaaaagaatatggtggtgtccttcgaagatgggattagctttgtgatcgtcctacaccaggtttggaagaaacatccggttcaccaggacttcctagggttctacgtggtggacagtcaccggatgtcagcacagacacatgggctgctgggccagttcttccaaccctttgactttaaagtgtttgacgtccgcccaggctctgaccccatgaagccagacgccacaatggtggtgaagagtcatcggttgacagtcacaaggggctcccaaaaagattacaggaaggatgccagtgtcggcaccaaggtcgtctgctggtttgtccataacaatggggaagggttcatcgacggtgtccacaccgactatattgtccccagcttgttctgagtacacatgccagctgctgctgcagtagaaggcctggaacaggacacagaatggggctcgtgggaaggactgggacaataaagtgggtaaaccaaaaaaaaaaaaaaaaaaa

SEQ ID NO: 4271 - DNA, 1647 bp, Rattus norvegicus
  Genbank Accession No. X83399
cctctcgcccccccttcaggagcggttgtgcgatcagatcgatctaagatggcgactgtggaaccggaaaccacccctaccactaatcccccacctgcggaagaggaaaaaacagagtctaatcaggaggttgctaatccagagcactatattaaacaccctctacagaacaggtgggcactctggttttttaaaaatgataaaagcaaaacttggcaagcaaaccttcggttgatctctaagtttgatactgttgaagacttttgggctctatacaaccatatccagttgtctagtaatttaatgcctggctgtgactactcactttttaaggatggtattgagcctatgtgggaagatgagaaaaacaaacggggaggacgatggctaattacattgaacaagcagcagagacgaagtgacctcgatcgcttttggctagagacactgctgtgccttattggagaatcttttgatgactacagtgatgacgtgtgtggagctgttgtcaatgttagagctaaaggtgataagatagcaatatggacgactgaatgtgaaaacagagatgcagtcacacacatagggagggtatacaaggaaaggttaggacttcctccgaagatagtgattggttatcagtcccacgcagacacagctacaaagagcggctccaccactaaaaataggtttgttgtttaagaagacaccttctgagtatcctcacaggagactgcgtcacgcaatcgagattgggagctgaaccaaagcctcatcaaagcagagtggactgcactgaagctgactccatccaagtgttgctaagatataagagaagtctcattcgcctttgtcttgtacttctgtgttcattctcctccccaccccaatttttgctagtgtgtccacatcccaatcaaagaattacagtatacgtcaccccagaacccacagatgtgttcctggcccgctctgtaacagccgggtagagttaccacgacacacacttgcctttccacagtattcgaaaaagaacgtgcatttctgtcaccttagcaggaaaagatctggttttgttccactccatgcaggagcggatttgctggtgtgagagtctaagtacagctttctagcaaccttctgttttctgtcacagcattgtccttgctgtcctcttgctgatggctgctagatgttaatttatttgcttccctccttgataacattagtgattctgatttcaggtttttcatttgtttggcttttgtttttttcctcatgtaacattggtgaaggatccaggactatgacagaaaggtggaataaacattacatttgtgcattctttggtaagtttttttgttttttgtaactacaaagctttgctacaaatttatgcatttcattcaaatcagtgatctatgctgtgtgatccctaaacataattgtggactataaaaatgtaacaccataattacattcctaactagaattagttgtctgcttttgtatctttatgctgtactttaacactttgtattacttaggttattttgctttggttacaatggctcaagtagaaaagcggtcccatccatattaagacagtgtacaaaactgtaaataaaatgtgtacagtgaattgtc

SEQ ID NO: 4272 - DNA, 989 bp, Rattus norvegicus
  Genbank Accession No. X83579
gagcgaaccgtaatgagaaactggacttcctcggagagggacagtttgctactgtctataaggccagagataagaacaccaaccagatcgtcgccattaagaaaatcaaacttggacacaggtcagaagctaaagatggtataaatagaacagccttaagggagataaagctcttgcaggaactaagtcatccaaatataattggtctccttgatgcatttggacataaatcgaacattagccttgtctttgattttatggagactgacctagaggttatcataaaggataacagtctcgtgttgaccccatcccacattaaagcctacatgctgatgactcttcagggcttggaatatttacatcagcactggattctacacagggatctgaaaccaaacaacttgttgttagatgagaatggagttctgaaactggcagattttggcctggccaaatcatttgggagccccaattgggcttacacacatcaagttgtgaccaggtggtaccgggcccccgagttactgtttggagctaggatgtacggtgtgggagtggacatgtgggctgtcggttgtatcttagcagaattgcttctaagggttccttttttgcctggagattcagaccttgatcagctaacaagaatatttgaaactctgggtacaccaaccgaagaacagtggcctgacatgtgtagtcttccagattacgtgacgttcaagagtttccctggcatccccctgcagcacatcttcattgcagctggagacgacctgcttgagctcatacaaggcttgttcttattcaacccatgtactagaattacagcttcacaggcgttgaggaccaagtacttcagtaatcgtccagggccaacacctggatgccagcttccaagaccaaactgtccagtggaagcattaaaggaacagtgaaatccagccatggcgacaaaacggaaaagagcggaggccttagaacaa

SEQ ID NO: 4273 - DNA, 3276 bp, Rattus norvegicus
  Genbank Accession No. X84210
cgaccgacctgcagttgagccgagttggaaatgtgaacgcaagaagcaggcttgatttttttttcctccccccctctcctagctctctcctcctctctctccctctcgcacccacactcacgcacacctccagcccgcacacagacgtgcacgcaccccccgccgcccggcagttatgtattctccgctctgtctcacccaggatgagtttcatcctttcattgaagcacttctgccccatgtccgcgccttcgcctacacatggttcaacctgcaggcccgaaagcggaaatacttcaaaaagcatgagaagcgcatgtcgaaagaagaggagagggctgtgaaggatgaactgctaagtgagaagcctgaggtcaagcaaaagtgggcttcccgacttctggccaagttacggaaagatatccgacccgagtaccgagaggattttgttcttacagttacagggaaaaaacctccatgctgtgttctttccaacccagaccagaaaggcaagatgcggagaattgactgcctccgccaggcagataaagtatggaggttggacctcgtcatggtgatcttgttcaaaggtattccgctggaaagtactgatggtgaacgccttgtgaagtccccacagtgctcgaatccagggctctgtgtccagccccatcacataggggtttctgtaaaggaactcgatttatatttggcatactttgtacatgcagcagattcaagtcaatctgaaagtcccagccaaccaagtgatgctgacattaaggaccagccagaaaatggacatttgggcttccaggacagcttcgtcacatcaggtgttttcagtgtgactgagctagtaagagtgtcacaaacaccaatagctgcaggaaccggccccaatttttctctctctgatttggaaagttcctcatactacagcatgagtccaggagcaatgaggaggtctctacccagcacatcctctaccagctctaccaagcgcctcaagtctgtggaggacgaaatggacagtcctggtgaagaaccattttacacaggccaagggcgctccccagggagtggcagccagtccagcggatggcatgaagtagagccaggcatgccatctccaaccactctgaagaagtctgagaagtctggtttcagcagcccctccccttcgcagacctcctccctcggaacagcattcacacagcatcaccgacctgtcataacaggaccgagagcaagcccacatgcgacgccatcgactctccactttccaacgtcacctatcatccagcagcctgggccttatttctcacacccagccatccgttaccaccctcaggagacgctgaaggagtttgtccaacttgtctgccccgatgctggtcagcaagctggacaggtggggttcctcaatcccaatggaagcagtcaaggcaaggtgcacaacccattcctccccaccccaatgttgccgccgccaccgccaccaccgatggccaggcctgtgcctctgcccatgccagacaccaagcctccaaccacatcaacagaaggcggtgcagcctcccccacctcaccgatcctggtacctgggataaaagttgcagcgtcccaccatcctccagacagaccacctgaccccttctcaactctgtaacatggacgcaacctcaacccggcgcagttacaacttcactgtcagtggaaggggagagacaccaactcgaatcaacttgtacatggaaacagcgaacgtcgtggtcaaacagcaaaggcccataacttttcgggattcttttttttttttaatactttagggactgtcgaattctctaaatatggtgctggaaatgcgttgggctgtgtgacatttgaagtgttccagtggtggtgtgagcagtaggtgaagcggctggtaggggatgagccttgctcacgaacttcctgttgtaacacttttgagcctggccttttcacagtatttcaagaatttgcccgcgcaggtgtgtgaccctcccggagcacttggagacacctggagaatgaaatctttcgtagtagctaagatctgtgatctgtaacttacaggacactcaagggcaatgtttttggggttttcttttttttctgtaacatattagaaaaagcaatgcagttaagttatctttcttttagtttggtttggttcagcagtcagcagttaaatacataacacaaccctcaaggacagtgaacccactcatgttgcagagcaatccaaaaagacagcaaagactactactactactctcagttcggttgtttgtttttttttttttttttttgtttttttattaagttttgaaatgctgcacttacatttaaaaaaaacattttcaacaatttcaacaatgacacaaaagttcacatggaaatggggaagatggtctgttttgacagaaactgacaggaatcaaaacaatcgaattttgaattgagtgaagtgcaatttcattggatagctaagtatctttgtaagatagagattgttgaaaattctatttttgtttttcaagtcctcccaccccaggactctaaattattggggttaaaaaaaaacagccttgcaagaaaaaggggagctatttttgctttttatgttttttattgttaaacttgtatccctttaaaaaaaaaaaccgaaggaaaatttaaaaaaaaagcaaaaaaaaaaaatacaaatctaatggtgcttttacctccaatatgttaactacattaaatgctaattaattattttctgttatcaaagcacataactcaaatgaaatcatggtatctgttaattttataagctagaaatcactataatgaattatgccaattctggaaaattttacacatgtatggcaacaccagatctatcggttttcaaacgcctcgtcgtaaccagacattgtccagaagtttcaaagacccttcgcaaaccctgaatcggctacgggaaatatatcagatcgataaggacataactgtgtgagccattcagatcaaagtacttgttaggaaaataaacaaacaaacaaaaacaaaatgttcacacacacacacaccccaaatgtcttgtatcttatgtttaaggaaaaagaaaagacaaaacggcacgagggtctgaccaccatgacaacctacagcaacaaggaccaaagctgagagaggcgtctcattcactcgtgaccttctggtggcaccgagcaggctgctctcttgcacagatggttg

SEQ ID NO: 4274 - DNA, 463 bp, Rattus norvegicus
  Genbank Accession No. X89696
catctgcaagcccttgcactacatgaccatcatgagccgacctgtgtgtatattcctagtgggtgctgctgtaatcttaggattcatccatggagcaatacaaactttatttatggcccagttacccttctgtggtcccaatatcatcaaccattttatgtgtgacttaataccactcctggagttggcctgcactgacacacacactctggggcccctgatcgctgccaacagtgggtcactgtgtttgcttactttctctatgctggttgtttcctatgtggtcatccctcgctccctgaggaatcacagttcagaagggcgtcgcaaagctctgtctacctgtgcctctcatgtcactgttgttgtcttattccttgtaccttgttcttacctgtacctaaggcccatgacctccttccccactaacaaagctgtaactgtgttttgcaccctagtgaca

SEQ ID NO: 4275 - DNA, 430 bp, Rattus norvegicus
  Genbank Accession No. X89698
tatctgcaaacctctttactatacaactattatgagtaggcccatatgtcaccgcctggtggctggttcctgggtggggggattttttcattctattattcagattttcatcactatccctttgcctttctgtggtcccaatattattgaccactacttctgtgacctccatcccttattcaagttggcctgcactgacacttttgtggtaggggtaattatgtttgttaacagtggattattttctgtattttccttccttttcttggtgtcttcttacattgttatcctatataacttgaggaatcactctgctgaggggaggcgcaaggctctatctacctgtgcatctcacatcatggtggttgtcttgttcttcggacctgccatcttcctctacttgagacctgcttccacctacactgaagac

SEQ ID NO: 4276 - DNA, 472 bp, Rattus norvegicus
  Genbank Accession No. X89701
catatgccaccctttacagtacacaacaaagatgacccatcagctctgtgcccttcttgtcgtggggtcatgggtggtagccaatctgaactgtctgttacacatactgctcatggctcccctctcgttctgtgcagacaacatcatcccccacttcttctgcgatgcaactcccctcctgaaactctcctgctcagacacacatctcaatgaactgatgattcttacagagggagctgtgatcattgtcaccccatttgtctgtatcctgatctcctacatccacgtcacttgtgctgtcttgagagtctcatcccccaggggaggatggaaagccttctccacccgtggctcccacccggctgtggtctgcctcttctatggcaccatcattgctgagtatttctcctcttcatcccctcactcagctgggagggacatggcaggtgccatgatgtacacagtggtgacc

SEQ ID NO: 4277 - DNA, 1293 bp, Rattus norvegicus
  Genbank Accession No. X90710
ggagcattctgggtagaggtgaaaggccagagtcagaaggaagagttccaaagcaagcttcccaaggaaaatgggcacccagggaaaggtcattacatgcaaggcagccattgcctggaaaactgacagccccctttgcattgaagaaattgaagtttctcctcctaaggctcatgaagttcgaattaaggtaatcgccacatgcgtgtgccctactgacatcaatgccaccaatcctaagaagaaagctctcttcccagtagtcctcggccatgagtgtgcaggaattgtagaaagcgttgggccaggagtgaccaacttcaaaccaggtgacaaagtaatcccattcttcgcaccacagtgcaaaaagtgcaagctctgtctgagtcctctcacgaacctctgtgggaagctcagaaattttaaataccctactattgatcaagagctcatggaagacagaaccagcaggtttaccagcaaagaaagatcaatttaccacttcatgggagtcagttccttctctcagtacactgtggtttcagaagccaatcttgcccgagtggatgatgaggcaaatttggagagagtgtgtctgattggatgtgggttcacatcaggctatggggctgcgatcaacactgccaaggtcacccctggttccgcttgtgctgtctttggcctggggtgtgtaggtctttctgctgtaattggatgtaaaatagcaggtgcttccagaatcatagctattgacatcaacagtgagaagttcccaaaagccaaggccctgggagccactgactgccttaatcccagagacctagacaaacctgtccaagatgtcatcactgaactgacgggtggaggtgtggatttctccctggactgtgcaggaacagctcagaccttgaaagcagctgtagactgcaccgtcgtaggctgggggtcgtgcactgtggtcggagcaaaggttgatgaaatgaatatatccaccgtggacatgatattgggccgttctgtaaagggaacgttctttggtggttggaaaagtgtagactctgtcccaaacctggttactgactacaagaataagaaattcgatctggacttactggtgacccatgccctaccttttgacaaaatcaacgacgcgattgacctgatgaaccaaggaaaaagcatccgaacaatcctgaccttttgaagacgccaggaggaacttggaatgtcatcagattggatccaagcttgtccagatgacttcccacttcccacgatgagccaaggaaagcg

SEQ ID NO: 4278 - DNA, 2492 bp, Rattus norvegicus
  Genbank Accession No. X94551
ccgggcaggtgacaaagccgtggagatctatgccagtgtggcccagctgacccctgtggactcggaggctctagagagtgaagcaaataaaatcaagaaagaagctgcagatctggaccgtctgattgaccagaagctaaaagattacgaggaccttagggaagacatgcgaggaaaggaacatgaagtaaagaaccttctagagaaggggaaagccgaacagcagaccgctgaccaactcctagctcgagccgacgctgccaaggctcttgctgaagaagctgctaaaaagggacgcaataccttacaagaagctaacgacattctcaacaacctgaaagattttgatagacgagtgaacgataacaagacagctgctggaagaagctctaagcgaattcccgccatcaaccggaccatagctgaagccaatgagaagacaagggaggcacagctggcgctgggcaatgcagcagctgacgccacggaggccaagaacaaagcccacgaggcggagaggattgccagtggcgtgcagaagaatgccaccagtaccaaggcggatgcggagagaaccttctcggaagagacagacctggataacgaggtgaatggcatgttgaggcagctagaggaagcggagaatgagctgaagaggaagcaagatgatgccgaccaggacatgatgatggcgggaatggcttcacaggctgctcaggaagctgaacttaatgccagaaaagccaaaaactctgtcagcagcctcctcagccaactgaccgacctcttggagcagctgggacagctggacaccgtggacctgaacaagctcaacgagatcgaaggctctctgaacaaagccaaagacgaaatgaaggtgagcgacctggacaggaaggtgtccaacctggagaacgaggcccggaagcaggaggcagccatcttggactatgaccgagacatagcagagatcataaaggacattcacaacctggaggacatcaagaagacactaccaacaggctgctttaacaccccgtccatcgagaaaccctagtggtgggagggctgtaaggcagtgtccctgacagggggccctgtgaggcctcggtgccttgacagcgaaaaaattacacttttcagaccccccccacttctctgctgctctctgtcactgtccttttgacccaagaaaagtcagagtttaaagagaagcaagttaaacatccttaaccaggaacaaagggttttgcctaataaagtgtctcctccacttctgtcagcaccctaccggaactttcccttgtttgcctgaagtcatagcatcttccagtggcatacccacatcacgtgagcctttgtatgccagggcagacccagccccctcccctctctcaagcaccatcagaacctatcttagtactccatttttctatgaaggagatgttcagctcctcacgtatgcactgagatggccaatatgtccagtcgcatcttctgcctcctcttgaagcaaaggaaataaacatcctgtgccaaaggtattggtcattagacgttggtagccatccatcagacatgctggctgtttgagcataggccactgagccattacgggtaacagtgtagttacgtgtgggtctctgagagagcatggctcaaagatgcttacatttttctcctgtgctaattgactaggaagataaacgtttcccaatcctcagccgcctgatagagagtctggatgggcagcttgcacataccactacactaggtagcttttgatagttttataagcaggactcagtgcagaagaaacagagatgtgataaccactcacgttttttttcccccaaatcttactaattcttggagcttcgttagtgtgttagaattggaacttattgttagcatatctatcaaaacagtcgtcctctaaggtcttgaccaatgaaagaaaagcaaatctcctttccacccattttctgggaagtggatgtaaccggtatgattaggattccataagtgaatttctctttctctgttggagagagatgtgacatttggcccttagctccaagtctcttctgacatttacattctttcaaaacacatcattgttggccagatcctggtggcaaacgctgctctcagtgtttctcaaggccgtggaccccatctagttcctgcgctttgtcgtccgcccactctaagcctttcctctgtgtggggagggaagaaccatgcatggcgtttcctagtgggcttctcgacctctgatcctcagctctgtggttcccttaagaccacaccgggacagttccctgccacacgcccccttcctcctatctacctgcctctgagattcgtatttagcctttaacactatgcaattttgtactttgcgtagcggggggggaaagaaactattatctgacacactggtgctattaattatttgaaatttatatttttttgtgtgaatggatttt

SEQ ID NO: 4279 - DNA, 1852 bp, Rattus norvegicus
  Genbank Accession No. X94769
ggtgctgagggctgggactatgcacactgcctgccctacttccgcaaggcacagaaacatgagctaggtgccaatatgtaccgtggcggggatggcccactgcatgtgtctcggggcaaaaccaaccacccactccaccaggccttcctgcaggcagcacgtcaggctggctaccccttcactgaagacatgaatggcttccaacaggagggcttcggctggatggacatgaccatccaccaagggaagcgctggagcacggccagtgcctacttgcgcccagcgctgagccgccccaacctcagggccgaggtccagacacttgtaagcagagtgctgtttgagggcacgcgagcagtgggcgtggagtacatcaaggacggccagagccacaaggcttacgtcagcagggaggtgatcctgagcgggggcgccatcaactctccacagctgctcatgctctctggtgttgggaatgcagatgacctcaagaaactgggcatccctgtggtgtgccatctgcccggagttggtcagaacctgcaggaccacctggagatctacattcagcatgcttgcacacagcccatcaccctccactctgcccagaagcctctgcggaaggtctgcatcggcctggagtggctctggaggttcacaggagatggagccacagcccatctagagaccggaggtttcatccgcagccggcctggggtcccccatccggacatccagttccacttcctgccatcacaagtgattgaccatgggcggaaacctacccagcaggaggcctaccaggtacatgtgggaaccatgagggccacaagtgtgggctggctgaaactgagaagcaccaaccctcaggaccacccaatgatcaatcccaactacctgtcaacagaaaccgatgtcgaggacttccgtcagtgtgtgaagctgacacgggaaatttttgcacaggaagccttcgctccctttcggggcaaagagctgcagccgggaagccatgtccagtcagacaaagagatagatgcctttgtgcgggcaaaagcagacagtgcataccatccctcctgtacctgtaagatgggccagccctctgaccccactgctgtggttgatcagcaaaccagggtcatcggggtagaaaacctcagagtcattgatgcctccatcatgcccagtgtggtcagtggcaacctgaacgctcccacgatcatgattgcagagaaagcagctgacgttattaagggatgccctgcactcggggacgagaatgttcctgtctacaagccccagactctggacacccagcgttaagacaaacaaacactgcctgaggacaacagaggaactcctgtcaagccaagagatccaaccagtacagtcctgccccagatagttctgaaactgtagaaacttgggacccagatacctctattcttggctcagactttcatgttatctgagcaaatgagatcatggtagcttgtgaggcaagtccctttccccagtgtctctctgagggccctccacaaaaaagctagcaagcacactgggccttcttgccctcctggcgtgagcagttagggatggtaactcttgccactgtttttttcttttctcctccagccatctccggctcagagctttgcttccataagtgggatgcttcctttccctggtctcccacctgaggtcaccctgcaaagcaggttgaactggactgggctctccaaggaagctttaactgaagccaagagccaggcagcagctcagccagggctggttacctgagctcatgtccctgactagagggaagggcagccagctggaggacatcttc

SEQ ID NO: 4280 - DNA, 2509 bp, Rattus norvegicus
  Genbank Accession No. X95189
ccatagcgaagacttcatgaagactgtcccaggcatgctgtgacacaaactacagaaggtgggaaaagatctttgtggtcaaaccatccggaccttggctaccgagacagaacaatactgaccgcattcactcatacacagttctcggcacctcccagtgctcagagcagaccctcaaggagatgagcagatccaggatggggagcccaatgcaccgagtgtccctgggggaccactggagctggcaagtgcacccggacatagacagcgaaaggcactcaccgtccttcagtgtggagcgacttaccaacatccttgatggaggcctcccaaacaccgtgctgcgaagaaaagtcgaaagcatcatacaaagtgacccagtgtttaatttgaagaagctttacttcatgacccgagaggagctatatgaggatgcgattcaaaagagattccatctcgagaagctagcctggagcctgggctggtcagaagatggtcctgaacgcatttatgctaacagagtccttgatggaaacgtcaacttaagcttacatggtgttgccatgaatgctatccgaagcctgggctcagatgaacagattgctaaatggggccaactctgcaaaaacttccaaatcatcacaacatacgcccagacagagctgggacacgggacatacctacagggcctggagactgaagccacctatgatgaagccaggcaggagcttgtgatacacagccctacgatgacttccaccaagtggtggcctggggacttgggatggtcggtcacccatgctgtggtcctagcccagttgacctgcttaggagtccggcacggcatgcacgccttcattgtgcccattcggagcctagaggatcacaccccactgccaggaatcacagttggggacataggccccaagatgggtttggaacacatagacaatggcttcctgcaactgaaccacgtgcgggttcccagagaaaacatgctcagtcgctttgcagaggtcttgccagatggtacctaccagaggcttgggacgccacagagcaattatcttggcatgttggtgacccgggtgcagctgctgtgtaaaggaatcctaccctccctccagaaggcttgcatcattgccacgcgctactcagtaatccgccatcagtctcgacttcggcccagtgacccagaggcaaaaatcctggaataccagacgcagcagcagaaactccttcctcagcttgctgtgagctatgccttccacttcacggccaccagcctctcagaattcttccacagctcctacagtgctattctgaagagagacttcagcctcctgcctgagctccatgcattgagcactggtatgaaggccacgtttgcagacttctgtgcccagggcgccgagatctgtcgcagagcttgcgggggccatggctactcaaagctgagcggcctgccgacactggttgctcgagcaacagcctcttgcacatatgagggtgagaatacggtgctctacctgcaagtggccaggtttctgatgaagagctatctgcaggctcaagcgtccccaggcgccacaccacagaagcctctccctcagtccgtcatgtatattgccacacaaaggccagccaggtgctcagcccagactgcagctgacttccgctgcccagatgtctataccacagcctgggcatatgtgtctaccaggctcataagagatgcagcacaccgtacacagaccctcatgaagtccggggttgaccagcatgatgcctggaatcaaactactgtcatccaccttcaggctgctaaggctcactgctacttcatcactgtgaagaatttcaaggaagctgtggagaaactagacaaggaaccagagattcagcgtgtgctccaacgcctctgtgacctctatgccttacacggtgttctgactaactcaggggactttctgcatgatggcttcctgtctggggcccaggtggacatggccagagaagccttcctagacctgcttcccttgatccggaaggatgccatcttgttaaccgatgcttttgacttctcggaccattgtttaaactcggcacttggctgttatgatggacacgtctacgaacgcctgtttgagtgggctcagaagtacccagccaatactcaggagaaccctgcctataagaagtatatccgaccactgatgctcggctggagacacaagatgtgaaaagtcaaaggatttgggaccgagaagcaccacggccttactatggcacatatacatagagaatttaaagcacggggggggggggggggggggtgctgctcggttaaatcaggtagtaaattggtacatgaatggatggtcatcctattagtctactattgagcatgtttgaaactttcccttgtccatctatagcatgtatttggctaaatgctaaaatttttgttttacatacaggaaaagctaataaacttgtcagttacaaa

SEQ ID NO: 4281 - DNA, 557 bp, Rattus norvegicus
  Genbank Accession No. X97374
gcaggacccaggccactgactccctctacaaactcttccttcccaggtgaacctcagacctgggaatcacctcagggaggaatggtgcttggccctttgtgttgtggtccccacagctgactaaccctctccccagaccgtactgactggcatgtgccccttatgtgtttcagcctcttgcttcccacggctgcaccatgaaaatcctgttttgtgatgtcctgctgctcagcctgctctccagcgtgttcagcagctgtcccgaggactgcctcacctgccaggagaggctccacccggctccgggcagcttcaacctgaaggtaggtccaggaggtggagggactgccctcttccctgacatctcttccctctgactccaaggcaaaccctacgaggtcctctggcttaagcagtatcatctgaccaagaggaaacaggtggatctgagctacatcttcctaccatgaccctgtggtcctccctctttattaccagattccagagatcctccctctctgccaccagactcctctggttctccctctctatctccc

SEQ ID NO: 4282 - DNA, 1900 bp, Rattus norvegicus
  Genbank Accession No. Y07534
tgcctggatggggcgcgtagtctctggctctaaactcttggcttctcagacacgatctatggctgtgttgagccgcatgagactgagatgggcgcttctggacactcgtgtgatgggccatggcctctgcccacaaggggccagagccaaggccgcgatccctgcagccctccgggatcacgagagcacggagggtccaggaacaggtcaagaccgaccgcgcctgcggagtctggcggagcttccgggacccggaacgctacgctttttattccagctatttctacgaggctatgtgctgcacttgcacgagctccaggcgctgaacaaggccaagtacggcccaatgtggacaaccacctttgggactcgcaccaatgtgaatctggctagcgccccgctcttggagcaagtgatgagacaggagggcaagtaccccataagagacagcatggagcagtggaaggagcaccgagaccacaaaggcctctcctatgggatcttcatcacacaaggacagcagtggtaccatctgcgtcatagtttgaatcagcggatgctgaagcctgctgaggcagccctctacacagatgccttaaacgaggtcatcagtgactttattgcccggctggaccaggtgcggacagagagtgcatcaggggatcaggtgccagatgtggcacatcttctctaccaccttgccttggaagccatctgctatatcctgtttgagaaaagggttggctgcctggagccctccatccctgaggacaccgccaccttcatcagatctgttggactcatgttcaagaactcagtctatgtcactttccttcccaagtggtctcggcctctgctgcccttttggaagcgatacatgaataactgggataacattttctccttcggggagaagatgattcatcaaaaagtccaggagatagaagcccagctacaggcggctgggccagatggggtccaggtatctggctacctgcacttcctgctgactaaggaattgctcagtcctcaagagactgtcggcacctttcctgagctgatcttggctggggtagacacgacatccaatacactgacctgggccctgtatcacctttcaaagaacccagagatccaggaagccttgcacaaggaagtgactggtgtggtacccttcgggaaggtgccccagaacaaggactttgcccacatgcccctgctaaaagctgtgattaaggagaccctgcgcctctaccctgtggttcccacaaactcccggatcatcacagaaaaggaaactgaaattaatggcttcctcttccctaagaatacacagtttgtgttatgccactacgtggtgtcccgagatcccagtgtctttcctgagcccgagagcttccagcctcaccgatggctgaggaagagagaggacgataactccgggatccaacacccatttggctctgtgccctttggctatggggttcggtcctgcctgggtcgcaggattgcagaactggagatgcaactcctgctgtcaaggctgatacaaaagtatgaggtggtcctgtctcccgggatgggagaagtgaagtctgtgtcccgcatcgtcctggttcccagcaagaaggtgagcctacgctttctgcagagacagtagtaccaagctgggctcctgctccatgggacttgtccagaagccctggcacagaagttcttggccagtctcacgtcacatgtcacgatgccagattcaacaggggacctctctgcccttcccatagacaccagacgtctggcacaatctctactgagcagcacccatttaagacattagagcacctcatatcacaggacggtgcttgggtacaatttaaaataaaatttaaaattcaaaaaa

SEQ ID NO: 4283 - DNA, 1662 bp, Rattus norvegicus
  Genbank Accession No. Y08355
cattcagtttagtcagaatccatgggtgggctcagctgtctcctccgtacctagtctgcggttatggcttcgctcacggtgaaggcctatctactgggcaaggaggaggcggcccgcgagatccgccgcttcagcttctgcttcagcccggagccggaggcggaagccgcggctggcccggggccctgcgagaggctgctgagccgggtggctgtgctgttccccgcgctgcggcctggaggctttcaggcgcactaccgcgatgaggatggggacttggtcgccttctccagtgatgaggaactgacaatggccatgtcctatgtgaaagatgacatcttccgcatctacattaaagagaagaaggagtgccggcgggaacatcgccccccatgtgctcaggaggcacgaagcatggtgcaccccaacgtgatttgtgatggttgcaatgggcctgtggtgggaactcgctataagtgcagtgtgtgccccgactacgacctgtgcagcgtctgcgaggggaagggcctgcacagggagcacagcaagctcatctttcccaacccctttggccacctctctgatagcttctctcatagccgctggcttcggaagctgaaacatgggcactttggctggcctggctgggagatgggcccaccagggaactggagcccacgtcctcctcgcgcaggggatggtcgcccttgccccacagctgagtcggcttctgctccatcagaggatcccaatgtcaatttcctgaagaatgtgggggagagcgtggcagctgccctcagccctctaggcatcgaggttgacattgatgtggaacatggagggaagagaagccgcctgacacccacctctgcagaaagttccagcacaggcacagaagataagagtggtactcagccaagcagctgctcttcggaagtcagcaaacctgacggggccggggagggccctgctcagtctctgacagagcagatgaagaagatagccttggagtcggtgggacagccagaggaactgatggagtcggataactgctcaggaggggatgacgactggacgcatttgtcttctaaagaagtggacccatccacaggtgaactccagtctctacagatgccagaatcggaagggccaagctctctagacccctcacaggaaggccccacagggctgaaggaagctgccctgtacccacatctcccaccagaggctgatccccggctgattgagtcactctctcagatgctgtccatgggtttctcggatgaaggcggctggctcaccaggctcctacagaccaagaattatgacatcggggctgctctggacacgatccagtattcaaagcaccctccaccattgtgacagtgctgtggccaagtcccacaacccacctcccttgtcttctagttgcatcatgtagagtagcagggcttctaaggcccagtgtcttggcattcttctagaaccttcaggtgggactgtgaggccttcttaggcagtaggaaagtgcatgagaagagagtctgagtgtgcacatgctgacccctgagcacagatccaagcagctgtggctgggcttmcgctgctttccctcggcctggcctttgccagggagctgtggagtcatgctgcactccactt

SEQ ID NO: 4284 - DNA, 2711 bp, Rattus norvegicus
  Genbank Accession No. Y09507
ccgcctcccaccccgcttctggacttgcccctttcttctgcgcgtgaggacagagccggcgcttaggccggagcgagcccaggggctgccggccggtgaagacaccgcgggcaccgattcgccatggagggcgccggcggcgagaacgagaagaaaaagatgagttccgaacgtcgaaaagaaaagtctagggatgcagcacgatctcggcgaagcaaagagtctgaagttttttatgagcttgctcatcagttgccacttccccacaacgtgagctcccatcttgataaagcttctgttatgaggctcaccatcagttacttacgtgtgaggaaacttctagatgctggtgatcttgacattgaagatgaaatgaaagcacagatgaactgcttttatctgaaagccccggatggctttgttatggtgctaacagatgatggtgacatgatttacatttctgataacgtgaacaaatacatggggttgactcagtttgaactaactggacacagtgtgtttgattttacccatccatgtgaccatgaggaaatgagagaaatgcttacacacagaaatggcccagtgagaaaggggaaagaacaaaacacgcagcgaagcttttttctcagaatgaaatgtaccctaacaagccgggggaggacgatgaacatcaagtcagcaacgtggaaggtgctgcactgcacaggccacattcatgtgtatgataccagcagtaaccagccgcagtgtggctacaagaaaccgcctatgacgtgcttggtgctgatttgtgaacccattcctcatccatcaaacattgaaattcctttagacagcaagacatttctcagtcgacacagcctcgatatgaaattttcttactgtgatgaaaggattactgagttgatgggttatgagccagaagaacttttgggccgttcaatttatgaatattatcatgctttggactctgatcatctgaccaaaactcatcatgacatgtttactaaaggacaagtcaccacaggacagtacaggatgcttgcaaaaagaggtggatatgtctgggttgagactcaagcaactgttatatataatacgaaggactctcagccacagtgcattgtgtgtgtgaattatgttgtaagtggtattattcagcacgacttgattttctcccttcaacaaacagaatctgtcctcaaaccagttgaatcttcagatatgaaaatgacccagctgttcactaaagtggaatctgaggacacgagctgcctcttcgacaagcttaagaaagagcccgatgccctgactctgctagctccagcggctggggacacgatcatatcactggacttcggcagcgatgacacggaaactgaagaccaacaacttgaagatgtcccgttgtacaatgatgtaatgttcccctcttctaatgagaaattaaatataaatctggcaatgtctccattacctgcctctgaaactccaaagccacttcgaagtagtgctgatcctgcactgaaccaagaggttgcattgaagttagagtcaagcccagagtcactgggactttcttttaccatgccccagattcaagatcagccagcaagtccttctgatggaagcactagacaaagctcacctgagcctaacagtcccagtgagtactgctttgatgtggacagcgatatggtcaatgtattcaagttggaactggtggaaaaactgtttgctgaagacacagaagcgaagaatccattttcagctcaggacactgatttagacttggaaatgctggctccctatatcccaatggatgatgatttccagttacgttcctttgatcagttgtcaccattagagagcaattctccaagccctccgagtgtgagcacagttacaggattccagcagacccagttacagaaacctaccatcactgtcactgccgcaactgccaccaccgccaccaccactgatgaatcaaaagcagtgacgaaggacaatatagaagacattaaaatactgattgcatctccaccttctacccaagtacctcaagaaatgaccactgctaaggcatcagcatacagtggtactcacagtcggacagcctcaccagacagagcaggaaagagagtcatagaaaaaacagacaaagctcatccaaggagccttaacttatctgtcactttgaatcaaagaaatactgttcctgaagaagaattaaacccaaggacaatagctttgcagaatgctcagaggaagcgaaaaatggaacatgatggctccctttttcaagcagcaggaattggaacgttactgcagcaaccaggtgaccgtgcccctactatgtcgctttcttggaaacgagtgaaaggatacatatctagtgaacaggatggaatggagcagaagacaatttttttaataccctctgatttagcatgtagactgctggggcagtcaatggatgagagtggattaccacagctgaccagttacgattgtgaagttaatgctcccatacaaggcagcagaaacctactgcagggtgaagaattactcagagctttggatcaagttaactgagcttttcctaatctcactcctttgattgttaatttttgtgttcagctgttgttgttgtctgtggggtttcgtttctgttggttgttttggacactggtggctcactacct

SEQ ID NO: 4285 - DNA, 2958 bp, Rattus norvegicus
  Genbank Accession No. Y11283
acgaactggagacaaatgaagagccctgcccctgcccacatgtggaacattgtactggtcttgctctcgctgttggctgtgcttccgatcactactactgagaagaatggcatcgatatctacagtctcacagtggactcccgggtctcttcccgatttgctcatactgttgttaccagccgggtggtcaacagagccgatactgttcaagaagcgaccttccaagtagagctacccaggaaagccttcatcaccaacttctccatgatcattgatggtgtgacctacccagggttgtcaaagagaaggctgaagccagaagcaatacactgctgctgtggccggggagagagcgctggccttgtcaagaccactgggagaaagacagagcagtttgaagtgtcagtcaacgtggcccctggttccaagactaccttcgaactcatataccaagagctgctccaaagacggctgggaatgtatgagctactcctcaaagtgaggcctgagcagctggtcaagcaccttcagatgacatctacatctttgagccctcagggtatcagcaccctggagacagagagtactttcatgacccaggagttggcaaatgcccttaccacttcacagaacaagaccaaggcacatatccagttcaagccgacactctcccagcaacggaagtctcagaatgagcaggacacggtgctagatggggatttcaccgttcgctatgatgtggaccggtcttccactggcggataccttcagattgagaacggctactttgtgcaccactttgccccagaggaccttcctacaatggccaagaatgtgctctttgtcattgataaaagcggatctatggcaggcaagaaaatccaacagacccgagaagccctaatcaagatcttgaaagacctcagcacccaagaccagttcaatatcattgtgttcagtggggaagcaaaccagtgggagcagttgctggtgcaagcaacagaagagaacttgaacagggcggttgactatgcttccaagatcccggctcagggagggaccaacatcaataaagcagtgctatcggctgtggaactgctggataaaagcaaccaggctgagctactgccctccaagagcgtttccctcatcatcctgctcacggatggcgagcccactgtgggggagaccaatcccaagattatccagaagaacacacaggaagccatcaatgggcggtatagcctcttctgcctggggtttggctttgatgtgaactatcctttcctggagaagctggccctggacaacggaggcctggcccggcgcatctacgaggactcagactctgctctgcagcttcaggacttctaccaggaagtggccaatccgctgctgtcatcagtgacctttgaatatcccagcaatgctgtggaggacgtcacgcggtacaacttccaacaccactttaagggctcagagatggtggtggctgggaagctccgggaccagggccctgatgtcctcttagccaaagtcagtgggcagatgcacctgcagaacatcactttccaaacggaggccagcatagcccaacaagagaaagagttccagggtcctaagtacatctttcataactttatggagagactctgggcgttgctgaccatacagcaacagctggagcagaggatttcagcctcaggagctgagttagaggccctcgaggcccaagttctgaacttgtcactcaagtacaattttgtcactcctctcacgcacatggtggtcaccaaacctgaagatcaagaacaattccaagttgctgagaagcctacggaagtcgatggtggagtgtggagtatcctctcagcagttcaacggcatttcaagactcctaccacaggatctaaactgctgacatccaggctgagaggaaataggttccagacattgtccagactcggggatggtctcgttggatctagacaatacatgcctcctcctggacttcctggacctcctggacttcctggacctcctgggcctcccggacatcctcattttgcttctagcattgactacggcaggcagccttccttgggaagggtgctagacctgccatccttatcctcacaagatccagccggcccaagtctagccatgttaccgaaagtggtggaacaagaaggcaccacaccagaggaatccccaaacccagaccacccccgggctcctaccatcatcctgccgcttccgggatctggtgtggaccagctctgtgtggatatcttacattctgagaagcccatgaagctgtttgtagacatcaatcaggggctggaggtggttggcaagtatgagaagaatatcgggttctcatggatcgaagtgaccatcctgaagcctcacctgcaggtccatgcaacgcctgaacgactggtggtgacaaggggccgaaaaaactctgaatacaagtggaagaagacactgttctctgtgttacctggcttaaagatgaccatggataagacgggactgctacagctcagtggcccagacaaagtcaccatcagcctcttgtctctggatgaccctcagagaggactcatgctgcttttgaatgacactcatcacttctccaacgacattacaggggagcttggtcagttttaccaggatatcatctgggatgatacaaaacagacagtcagagttctaggaatcgactacccggctaccagagagctcaagttgagttatcaagacgggttcccgggaacagagatttcctgctggacggtgaagatatagaactgacaggagcattgtttgctacctgccatgttgtcctcgtatgcaggcggatgacactgtgtgccaacagggccgcctgtgaggcctagaccttgatggggaagaggatgctctcttgttacaaataaagaagggtgatgt

SEQ ID NO: 4286 - DNA, 1614 bp, Rattus norvegicus
  Genbank Accession No. Y12635
cgggccagcacaagatggcgttgcgagcgatgcggggaatcgtgaacggggccgcgcccgagctgcccgtgcccaccggtgggccgatggccggagctcgggagcaggcgctggcggtgagccggaactacctctcccagcctcgtctcacctacaagactgtctctggagtgaatggtccactagtgatcttagatcatgtaaagtttcccagatatgctgagattgtccacttgacattaccagatggcacaaaaagaagtgggcaagttctagaagttagtggctccaaagctgtggttcaggtatttgaaggaacatccggcatagatgccaagaaaacatcctgtgagtttactggagatattctccgcacaccagtgtctgaggatatgcttggtcgagtattcaatggatcaggaaaacccattgaccgaggtcctgtggtgttggccgaagacttccttgacatcatgggtcagccaatcaaccctcagtgtcgcatctacccagaagagatgattcagacgggcatttctgccatcgacggcatgaacagtattgcgaggggacagaaaatccccatcttttctgctgccgggttaccacacaacgagattgcagctcagatctgtcgccaggctggtttggtaaagaaatccaaagacgtggtagactacagtgaagaaaactttgccattgtgtttgctgctatgggagtaaacatggaaacagcccggttcttcaaatctgactttgaagaaaatggctcaatggacaatgtctgccttttcttgaatctggctaatgacccaactatcgagaggatcatcactcctcgcctggctctgaccaccgctgagtttctggcttaccagtgtgagaagcatgtcctggtcatcctgacagatatgagttcttacgctgaagcacttcgagaggtttcagctgccagggaagaggttcctggtcggcgaggcttccccggctacatgtatacggatttagccaccatctatgaacgcgctgggcgagtggaaggtagaaatggctctattacccaaatccctattctcaccatgcccaatgatgatatcactcatcctatccctgacttgactgggtatattactgagggccagatctatgtggacagacagctgcacaacagacagatttaccctcctattaatgtgctgccctcactctctcggttaatgaagtcagctattggagaaggaatgaccaggaaggatcatgctgatgtgtctaaccagttgtacgcatgctatgctatcggtaaggatgtgcaagccatgaaagctgtggtgggagaagaagccctgacctcagatgacctcctttacttggaatttctgcagaagtttgagaaaaacttcattactcagggtccctatgaaaatcgaactgtctatgagactttggacattggctggcagttgcttcgaatcttccccaaagaaatgctgaagaggatccctcagagtaccctgagcgaattttaccctcgagactctgcaaagcactagctgctgctgcttgtgcggctcgaccctcttgtgaagtgctggttctgtttcctgattccttttg

SEQ ID NO: 4287 - DNA, 2854 bp, Rattus norvegicus
  Genbank Accession No. Z12158
atcgctcctttttgagtgcctgggtgccgcggctgccgcgtcagtctgctgcgctccatgaggaagatgcttgccgctgtgtcccacgtgttggcaggcgctgcgcagaagccggcaagcagagtgctggtagcttcccgtaatttcgcaaatgatgctacatttgagattaagaaatgtgaccttcatcgtctagaagagggccctccagtcaccacagtgctcaccagagaggatgggctcaagtactacaggatgatgcagaccgtgcgccggatggagctcaaggcggatcagctgtataagcagaaaattattcgtggtttctgtcacttgtgtgatggtcaggaagcctgctgtgtgggcctggaggctggcataaaccccacggaccatctcatcactgcctatcgagcccatggcttcaccttcactcggggcctgcctgtccgagcaattcttgcagaattaacaggacgaagaggaggctgtgctaaggggaaaggcggatcaatgcacatgtacgccaagaacttctatggcggcaacggtatcgttggagctcaggtgcccctgggtgcaggaattgctctggcctgcaagtataatggcaaagatgaggtctgtttgacattatatggtgatggtgctgctaaccagggtcagatatttgaagcttacaatatggcagcattgtggaaattaccttgtattttcatctgtgagaataaccgctatggcatgggcacatctgttgagagagcagcagccagcacggattactacaaaagaggagatttcattcctggactgagggtagatggaatggatatcttgtgtgtccgagaggcaacaaagtttgcagctgcctactgcaggtctggtaaggggcctatcctgatggagctacagacttaccgctaccatggacatagtatgagtgaccctggagtcagttatcgcactcgagaagaaatccaggaagtaagaagtaagagtgaccctattatgcttctcaaggatagaatggtgaacagcaatcttgcaagtgttgaagaattaaaggagattgatgtggaagtgaggaaagaaatcgaggatgctgcccagtttgccacggctgatccggagccgccattggaggagctaggctatcatatctacagcagtgacccacccttcgaagtgcgtggtgccaaccagtggatcaagtttaagtcagtcagttaatgggagagtattagatggatgggcgtttctcatccgttgtaagaaactctttgtgctctcaactttgacaggaaatacccagacaacaaaagtcttgaaaacatgtaaattaagggagagtaaaattgcatgcagtttgtacattgttgtattcggtgtattcatgtgaataagagtgtataggattggagatgggtaatgcagtttataaccttcatcatgtcctaggtcagttactaaaaggaacaactctgccatttggtgatgtgatcatagctttgaatgaccttgtggaggcatgctgggattaatgcaaagcacaggttagaagtgtatggtcaccatgaattgtggaggctggactctgtttggcactgaccgttatgtctttgatcaaaggctatatataatcatgtgttttaaaataagggtacttcagtcacttcaaaggtaaaataatttaattttctccatttagacatttaacaaacacaaaattgtactcccattccaaggcacactttttaacttttcacatttaagtaattacactggtttataaaatacttaggctttatctttccagcaactgctataaggtatgctgacattttaaatactaggtcaggagagacattacttacaatccggtttataaacaagtatgctctaaatcacatgtgcttgaatgaaacgaacaagggtctttctgtgtaaacgcaggatttgtgtgtgcactaacagaagctttaatcgtgagcaggtgtagggtactttttgctcattctccccagcttggcttattgtgaggactcctgcatttgtcttctgtgctgggagactgcatgccagagcctacagaggacaccaccactgcaaaacaataattttcataagaaaagcaaacttgaagccacccatctactcttcaaatgtaatctctaacttaaaagtatgtaaccttttcctagacatggtaccataggaacactgggtgatctgggtagaggtgtgggcatttaaacaatgtaaagaaaggtctggcacctcatgccttgccaacctgagaaaatgagctgtgcttgctacaacataggaaagataaatttcaaagatcggggaaactaccagcattaaaaataaaagtattcacataaaaaagccccattttattatttaaattgtttgcaggctctcttaccgtagtctgaggcaccttaggtcttccttagtgatatcattgagaatatcagaaagtgtgtaatcttcttcaacaatctgaaagattcaacatacattcaacaacataagcagcttttcaacagtatcataggaatcctttgatttagaaatttaccttttctattgtatttgcatccactccttgtagctgcaaccagtctataagctctctgttggttcccagtccgtcatggggtggtgggttctctgttccacctataaagattccaattttgttttattgtatagtaatgtataaccataaaatgcttcaaaaataacaaagtggatgtaatcatgtatccaaacagaaatgtaaatgtgctgtgaaaaggaaatgaattaaacttgtttgacccgctaaaaaaaaaaaaaaaaaaaa

SEQ ID NO: 4288 - DNA, 4381 bp, Rattus norvegicus
  Genbank Accession No. Z22867
agcgcccggaacggggagggcgcggggtcggcgagcgccagcggcctcccggcagcccggggctatgaggaaggacgagcgcgagcgggacacgccagccatgaggtccccgccgccgccgccgccgccggccacggccacggccgcctcgccccccgagagcctgcgcaacggctacgtgaagagctgcgtgagcccgctgcggcaggaccctccgcgcagcttcttcttccacctctgccgcttctgcaacgtggagccgccggcggcctcgctccgcgccggggcacgcctctcgctcgccgctctggccgcctttgtcctggccgcgctgctgggcgcggggcccgagcgctgggcggccgcggcgaccgggcttcggacgctgctgagcgcttgctcgctcagcctcagcccgctcttcagcatcgcctgtgccttcttcttcctcacctgcttcctgacgcgcgcgcagcgcggcccggaccgcggcgccggctcctggtggctgctggcgctgcctgcctgctgctacctgggcgacttcgcggcgtggcagtggtggtcgtggctgcgcggggagccggcggcggcggcggccggccggctctgcctggtgctgagctgcgtggggctgctgacgctcgcgcctcgcgtgaggctgcggcacggagtcctggtgctgctcttcgccggcctggtgtggtgggtgtccttctccggcctcggggctctgccgcccgcgctcaggcctctgctgtcgtgcctggtcgggggcgcgggatgcctgctagccctgggcttggaccacttctttcacgtccggggagcctcacctcccccgcgctcggcgagtaccgcggatgaaaaagtgcctgtgatcagaccccggaggaggtccagctgcgtgtcgctgggagaaagcgcggccggttactatggcagtggcaagatgttcaggagaccgtcgttgccttgtatttctcgagaacagatgattctctgggactgggacttgaagcagtggtgtaaacctcattaccagaattctggaggtggaaatggagttgatctttcagtgctaaatgaagctcgcaatatggtgtcagaccttctgattgacccaagccttcccccacaagtcatttcttctttgcggagtatcagtagcttgatgggtgctttctcaggttcctgtaggccaaagattaattctttcacaccatttcctggattttatccctgttctgaagtagaagatccagtagagaaaggcgatcgaaaacttcacaaggggttgagtagcaaacccagtttcccgactgcacagctgaggaggagctcaggagcgtcaggattgctgaccagtgagcaccactcacggtgggatcgcagcggtggcaaaaggccttaccaagaactcagtgtttcaagtcatggatgccacctaaatgggccttttagttcaaatcttatgacaattccaaagcagaggtcatcatctgtgtcgctgacgcaccatgcaggtctgagaagagctggtgctttgcccagccccagtcttctgaattcttcaagccatgtacccgtgtctgctggctgtctaactaatcgatcacccgtaggatttcttgataccagtgattttcttactaagccaagtgttactttacatagatcactgggcagtgtatccagtgcagcagatttccatcagtaccttaggaactctgacagcagtctgtgtagcagctgtggacaccaaatactcaagtatgtttcgacatgtgaacctgatggtacagaccaccacaatgaaaaatcaggtgaagaagacagcactgttttctcaaaagaacgattgaacattgtggaaactcaagaagaagagacagtgaaggaagactgcagggaattatttttggaaggtgatgatcacctaatggaagaggcccagcaaccgaatattgaccaggaagtgttattggacccgatgttagtggaagattatgattcattaatagaaaagatgagcaactggaactttcagatttttgagcttgtagaaaaaatgggagaaaaatcaggaaggattctcagtcaggttatgtatactttatttcaagatactggtttattggaaacatttaaaattcccactcaagaatttatgaattattttcgtgcactagaaaatggctaccgagatattccatatcacaatcgtgtgcatgccacagatgtcctacatgctgtttggtatttgacaacacgaccaattcctggcttacagcagctccataataaccatgaaacagaaaccaaagcagattcagatgctagacttagttctggacagattgcttacctttcttcgaagagttgctgtattccagataagagttatggctgcctgtcttcaaacattcctgcgttagaactgatggctttatatgtggcagctgccatgcacgattatgatcacccaggaagaacaaatgcattcctagtggctacaaatgcacctcaggcagttttatacaatgacagatctgttctagaaaatcatcatgccgcatcagcgtggaatctgtatctttctcgcccagaatacaacttcctccttaaccttgatcacatggaattcaagcgttttcgatttttagtcatagaagcaatccttgctacagatctcaaaaaacattttgatttccttgctgaattcaatgccaaggccaatgatgtaaatagtaacggtatagaatggagcagtgaaaacgatcgactcttagtctgccaggtgtgcatcaaattagcagacatcaacggcccagcaaaagatcgggatcttcatttgagatggacagaaggcattgtgaatgagttttatgagcagggagatgaagaagcaaccctgggtctacctattagtcccttcatggatcgttcttctcctcaactagcaaaactccaagagtcatttatcacccacattgtgggccccctgtgcaactcctatgatgctgctggcttgctgcctggtcagtggatagaagcagaagagggtgacgatacagaaagtgatgatgatgatgatgatgatgatgatgatgatgatgatgatgatgaagagttagattcagatgatgaagaaacagaagacaatctaaatcctaaaccacaaagaaggaaaggcaggcggcgaatattttgccaactaatgcaccacctcactgaaaaccacaagatctggaaggaaatcatagaagaggaagaaaaatgtaaagctgaggggaacaaactgcaggtggataatgcctccttacctcaggcagatgagattcaggtcattgaagaagcagatgaagaggaagaacaaatgtttgaatgagaagaaaactcatgctgaagaagcctggggtgctcttcccagggtcgttacctagtgctcaccgtactgattctcaactgaccattcccatgtggacaggccttaatactgtgaggggatccttgctaccttggtagttctcactcctaagcactttgattacagactagagactgaccttagagctttctgcagttgagtgatgctgcagagccttctccaagccttcactggtgtgtaaatagtgtgtcataatgctgctttgctgggtagtgagctctcgtttgtcatggtgagggagggaggtagggagggagggagggatggagggatggagggaaggagggagggctaacacagaaaagtcaagtgaccttggttttcaaagtgaccataattcttttatgaaaacaggatacctcgggtatttccaaatatatcttctatgtctttgtttgggggtgggatggggccagaaacaaacttctatgcttaatccaaaaaggaatttatcacggcctttctgagtgatttctgctcgtggcagtacactgttccatgtggttctcctagcttcatccgtgaaggactgaggacctttgttatacttaacaaaacccagatgcatcaatttctgatgctttttactgttgtgtataatctacttaagtgttttatttctgccgaaagtattcaggtttgctgtggacatcaggagtctgaattctgttcttactgattttgttccatggttgaattttaaaagtgtttaacaatgaaggaactttattctttagtcaaaactgttatttttattcttgctcaggatacataattttaaacattaattattataaacgtggcatagatttgccagaaaaaaaacattgtcctaatattgatgttaccttttatgaaatgagcaccattttcttttaattaaagccaagaaaaaggagatgactatcttttgccttagtggaaaatcaa

SEQ ID NO: 4289 - DNA, 1634 bp, Rattus norvegicus
  Genbank Accession No. Z48225
cacagtcatggctgcggtggcggtggctgttcgcgaagaatcgagatccgagatgaagacagaactttcacctcggcccggggcagcggggcgggagttgacccaagaagagaagcttcagcttcggaaagaaaagaaacagcagaagaagaaacggaaggaggaaaagggggcagaccaagaaattggctctgctgtatctgcagctcaacgtcaagacccagtcagagaacttcaaggaactggtagtcagttgggaggcactactggggagaaacttccagctggccggagtaaggcagaacttcgagcagaaaggagagccaagcaggaggcagagcgggccctgaaacaggccagaaaaggggaacaaggaggaccctctcctcaggcctgccccagcacagctggagaagccacctcaggagtgaagcgtgtccctgagcacacccaggctgatgaccccacacttctgaggaggctccttagaaagccagatcgacaacaggttcctacaagaaaggattatggatccaaagtcagtctcttctcccacctaccccagtacagcagacaaagctccttaacccagtacatgagcatcccatcctctgtgatccacccagccatggtgcgactcggtctgcagtactcccagggccttgtcagtggctccaatgcccggtgcatagcgctgctccacgctctgcagcaggtgattcaggattacacaacacctcccaatgaggaactctccagggatcttgtaaataaactaaaaccctacatcagcttcctgacccagtgccgccccatgtcggccagcatgtgtaacgccatcaagttctttaacaaggaagtcactggtatgagcagctccaagcgggaagaagaggccaagtcagaacttaaagaagccatcgatcggtatgtgcaagagaagattgtgcttgcatctcaggcaatttcacgatttgcttctaagaagatcagtgatggggacgtgatcctagtatatggatgctcatctctggtgtcgagaattctccaggaggcctgggttgagggcaggcgcttccgggtggtggtggtagacagccggccccggctggagggaaggcatatgctccactgtctggtccgtgctggggtccctacctcctatctgctgattcctgcggcctcctatgtgctcccagaggtttctaaggtgctattgggagctcatgcactcctggccaatggatctgtgatgtcgagggtagggacagcacagttggccctggtggcccgagctcataatgttccagtactggtctgctgtgaaacatacaagttctgtgaacgcgtgcagaccgatgcctttgtctccaacgagctagatgaccctgacgatctccagtgtaagcggggagaccaggtgaccctggcgaactggcagaacaactcatcactccggttgttgaatctggtctatgacgtgactccccccgagcttgtggatctggtgatcacagagttgggcatgatcccttgcagttctgtgcctgttgtcctccgagtcaagagtagtgaccaatgaaaggcatcaagggtcaataaaaaacttattccttactgccataaaaaaaaaa

SEQ ID NO: 4290 - DNA, 1091 bp, Rattus norvegicus
  Genbank Accession No. Z50052
attcgcatttctagaaactgggaaatttcttaagattttaattctggcagctctttaattgtctctttgtggttgcaaatccactggatacactgtcttatttctgctattcttctctattacagggtagactttctttttcccatctgttacaggggaaatataattccttagaaggaagttgttttgatctgacgtctttagaggatgcttttgactgatatcagagtttaagtccatcgtgggtcaagtaactggtcaccaaatgctttgtttggttgtgtgctgtctgatatggttgatttctgccttagatgggagctgttcagaaccccctccggtgaacaatagtgtgtttgttggaaaggaaactgaagaacagattctgggaatttacctttgtatcaaaggctaccacttggtgggaaagaagtctttggtctttgatccctcgaaggaatggaattcgaccctccctgagtgcctcctgggccactgtcctgaccctgtactggaaaatggcaagatcaattcttctgggcctgtgaatataagtggcaaaatcatgtttgagtgtaatgatggttacatcctcaagggaagcaattggagccagtgcctagaggaccacacctgggcacctcccttgcccatctgccgaagtagagactgtgaacctcctgagactcctgtccatggctattttgaaggagaaactttcacttcaggatctgtcgttacttattactgtgaagatgggtaccacctagtgggcacacagaaggtgcagtgcagtgatggagagtggagcccgtcctatcctacctgtgagtccatccaggaaccccccaaatcagctgaacagagtgcacttgagaaagctattcttgcctttcaggagagtaaggacctttgcaatgctacagagaactttgtgagacagctaagggaaggtggaataacaatggaagaacttaaatgttctctggagatgaagaaaactaagctgaagtcggatattttactgaactaccatagctaagcagaatggttacagacagacacctatgaataaattgcttctaaaggtg

SEQ ID NO: 4291 - DNA, 1828 bp, Rattus norvegicus
  Genbank Accession No. Z50144
gtggcactccgcagcactacccggagacagctaacagtgcagcccgagtgatctgggaagccgttctcagtgaccgacttttctagtcctgttccacgcgaccagcagagacatgaattactcaaggttcctcactgcaacgagcctggccagaaagacatcccctatcagagctacagtggagataatgagtagagcacccaaagacatcatctccctggctcctggatctccgaacccgaaagtgttcccctttaagtcagctgtcttcactgtggagaacggaagcaccatccggtttgaaggagagatgtttcaaagggccctccaatattcctcaagctatggaattccagaacttctgtcctggctaaaacagttgcaaataaaattgcataatcctccgactgtcaactactcacccaacgaaggacagatggacctctgcatcacatctggctgtcaagacggtctctgtaaggtgtttgaaatgctcatcaatcctggagacactgttctggtcaatgaaccactgtattcaggagccctttttgcaatgaaaccactgggctgcaattttattagtgtccccagtgatgactgtgggattattccagagggtctcaaaaaagtactttcccagtggaaaccagaagattccaaggatcccacaaaaaggactccaaaatttctgtatactattccgaatggcaacaaccctacaggcaactcgttgactggtgaccgcaagaaagaaatctatgagcttgcaagaaaatatgacttcctcataatagaagacgatccttactattttctccagttcaccaagccttgggaaccaacctttctctccatggatgttgatgggagagttatcagagctgactccctttcaaaagttatctcctcagggctgagagtggggtttataactggccccaagtccttgatacagaggattgttctccacacacaaatctcatcactgcatccctgtactttatcacagctcatgatatcggagcttctataccagtggggagaagagggtttcctggcccatgttgacagagctattgatttctacaagaaccagagggattttatattggcagctgcagacaagtggttacgtggtttggcagagtggcatgttcccaaagctggcatgtttctatggattaaagttaacggaatctctgatgcaaaaaaactaattgaagaaaaggctattgaaagagagatcttgttagttcctggaaatagtttcttcgtcgataattcagccccctcctccttcttcagagcatccttctctcaggttactccagcgcagatggacttagtcttccagagattggcccaactcataaaagacgtttcataaagaaatcaaactcagcattgaacttataattttaaaataaatttcctatactttgctgaagaaatggctgacaggatggatccagtttgtgaaatatctgtggcaatttcactgaacaactttgaagccccttaaaatccaccgcattgccaaaataactttctgatatacttttgccctttgattaattatgaactaacaaaacatcaaatttcattgttaaagacctctgtagctgcttaataatgtccaataaatttttttgagcctaacatagactaactaacatagtaaattgcaagggaattagttaaaatggcctataatatgcaggtttttttctactttaaggaaatttcatgagcatttactgcaaaaattgttgtaatttgacaattataaattactttgtaaccgaaaaaaaaaaaaaaaaaaaaa

SEQ ID NO: 4292 - DNA, 511 bp, Rattus norvegicus
  Genbank Accession No. Z68145
ccccaagcttagcagaaaggagcagagctgtgggccctggagcctcagtgggaagcagcaggtctagcctgtggacccttccaggcaggttcctgttccagatcatcccacggggagcaggtcccaggtgctggccccaaaggcttccatccgagtcccagttatggtacgtctttggtagtgggacccagctcacaatcctagggcagcccaagtctgaccccttggtcactctgttcctgccttccttaaagaatctccaggttaagaaggcgacactagtgtgtctggtgagcgaattctacccaggtactttggtggtggactggaaggtagatgggatccctgtcactcagggtgtggagacaacccaaccctccaaacagaccaacaacaagtacgtggccagcagctacctgacactgatgtctgaccaatgggtgcctcacagtagatacacctgccaggtcactcatgaaggaaacactgtggagaagagtttgtctcctgc

SEQ ID NO: 4293 - DNA, 707 bp, Rattus norvegicus
  Genbank Accession No. Z75029
gctctgggtcggggcccaccatcgaggaggtggattagaggctctttctggcgctccaggtgtgatctaggagacagatgggtggccttgaggactttgggttattgtcgtttaggacattaactccttcgttcggtctgcaatcaagtcctaggtttaagcaaactgccttccatttactctgtggaatttcacgtgtgctttgcattcccagtaaattagtactgggagtgtgtctttgcaatagatataatttcctgccttcaagtcagcactgccccccccccgaagttatttctttgcaggacagtcagagctatattgatatagcaagaggtgtgttacaaaaacaccaggacactgttgagttcctttgtgtttggactctcccctgggcgacagtgttgaggcactgttaagtcaggagctcggggccaccggtggatcactgaaagctgagactctgttgcttctcccgtttgacactctgttgctttccttgcatggtggctcacctaaggctgagactcttgttctccttccctgtataatcttgcctggcgttgcacttgttccccagtgtgtgaactcggagatgagtttacaccaccactgttagttcacgttttttgtttttacataaccatcctgaactcaggtcaatttttagctggctatttgaaaataaacttcaaaagaacttgcca

SEQ ID NO: 4294 - DNA, 275 bp, Rattus norvegicus
  Genbank Accession No. AI029571
gcggccgaaaggttttataatatgaactttaataatgattaaaattatgggctggtgaggcacttgctcacaggcctggctacttgagtttaatccctatatagagacccaattcctgagggttggcttatttgcacatataattattgatacttgaagtaattgacactggcattttgtcaacttttaaaattcattaataggatgataccagtgtataataaattatagttattcatatccgcaattatcccaattttctcccacatttacct

SEQ ID NO: 4295 - DNA, 380 bp, Rattus norvegicus
  Genbank Accession No. AA963133
atttgtttaattttatttaagaattttacaaaaacagaaacgaaacccaaacaaaaatgaaaaaaaaaaaccaaaaccaaaaccaaaaacaaaaccacaaaaccacaacaaaaacctaaatacagagagtactttccgtgtgaggatcaagcattttctacttgaggacaaatgagctctgctcagtgaggcggacacacttgtattgcatgagactgaattcgaaagttacatatcaaaatgatggtagcactgagttctggacactggggagcaggttcccaggagaggctgaaggcagcaacgtggcaggcggcgtggaaaaagcatgtacttttcctccggatggacagtcctatgcagcgcagcagtacgaaagg
